(19) United States
(12) Patent Application Publication
(10) Pub. No.: US 2016/0040155 A1
(43) Pub. Date: Feb. 11, 2016

(54) ACTIVATING AN ALTERNATIVE PATHWAY FOR HOMOLOGY-DIRECTED REPAIR TO STIMULATE TARGETED GENE CORRECTION AND GENOME ENGINEERING

(71) Applicant: UNIVERSITY OF WASHINGTON THROUGH ITS CENTER FOR COMMERCIALIZATION, Seattle, WA (US)

(72) Inventors: Nancy MAIZELS, Seattle, WA (US); Luther DAVIS, Seattle, WA (US)

(21) Appl. No.: 14/776,835

(22) PCT Filed: Apr. 16, 2014
(86) PCT No.: PCT/US14/34364

§ 371 Date: Sep. 15, 2015

Related U.S. Application Data
(60) Provisional application No. 61/812,498, filed on Apr. 16, 2013.
(60) Provisional application No. 61/909,328, filed on Nov. 26, 2013.
(60) Provisional application No. 61/932,709, filed on Jan. 28, 2014.

(51) Int. Cl. C12N 15/10

(52) U.S. Cl. CPC C12N 15/102; A61K 48/00

(57) ABSTRACT

The technology described herein is directed to methods for modulating the rate of homology-directed repair, e.g. in methods for gene modification.

### CROSS-REFERENCE TO RELATED APPLICATIONS

[0001] This application claims benefit under 35 U.S.C. §119(e) of U.S. Provisional Application No. 61/812,498 filed Apr. 16, 2013; 61/909,328 filed Nov. 26, 2013; and 61/932,709 filed Jan. 28, 2014, the contents of which are incorporated herein by reference in their entirety.

### GOVERNMENT SUPPORT

[0002] This invention was made with government support under Grant No. GM RL1 084434, awarded by the National Institutes of Health (NIH). The government has certain rights in the invention.

### SEQUENCE LISTING

[0003] The instant application contains a Sequence Listing which has been submitted electronically in ASCII format and is hereby incorporated by reference in its entirety. Said ASCII copy, created on Apr. 11, 2014, is named 034186-080730-PCT_SL.txt and is 986,323 bytes in size.

### TECHNICAL FIELD

[0004] The technology described herein relates to modulation of DNA repair mechanisms and applications thereof, e.g., gene modification, gene therapy, treatment of cancer and/or infectious disease.

### BACKGROUND

[0005] The DNA present in cells can be damaged by toxins, radiation, and/or oxidative stress. The most common form DNA damage severes a single strand of the phosphodiester backbone of the DNA double helix. This is referred to as a nick. If both strands are severed, the damage is referred to as a double-strand break (DSB).

[0006] Cells have a number of different mechanisms to repair the various forms of DNA damage, e.g. base excision repair, nucleotide excision repair, mismatch repair, single-strand break repair, and double-strand break repair. One type of repair is referred to as homology-directed repair (HDR). HDR uses a template molecule with homology to the damaged DNA to effect the repair and can occur at both nicks and DSBs.

### SUMMARY

[0007] As described herein, the inventors have discovered that there are in fact two types of HDR. The first, “canonical HDR,” has been well studied at DSBs, using as the donor for repair a double-strand DNA (dsDNA) molecule. Canonical HDR is positively regulated by RAD51, BRCA2 and BRCA1.

[0008] Described herein is a new type of HDR, “alternative HDR”. Notably, alternative HDR is suppressed by the activity of BRCA2 and functionally related genes (see, e.g., Table 1). Alternative HDR can use single-stranded DNA (ssDNA) or nicked dsDNA donor molecules. Efficiency of alternative HDR at nicks can reach levels comparable to canonical HDR at DSBs, but the rate of mutagenesis (i.e. incorrect repair) is much lower. Accordingly, described herein are improved gene correction and genome engineering methods that utilize alternative HDR in order to permit efficient gene modification with reduced rates of accompanying mutagenesis.

[0009] In one aspect, described herein is a method of increasing alternative homology-directed repair (HDR) at a target nucleic acid nick in a cell, the method comprising contacting the cell with an inhibitor of RAD51; BRCA2; PALB2 or SHFM1.

[0010] In one aspect, described herein is a method of modifying the sequence of a target nucleic acid molecule, the method comprising contacting the target nucleic acid molecule with a) a donor nucleic acid molecule comprising the modification to be made in the target nucleic acid molecule; b) a nickase; and c) an inhibitor of RAD51; BRCA2; PALB2 or SHFM1.

[0011] In some embodiments of the foregoing aspects, a cell-free system comprises the target nucleic acid molecule. In some embodiments of the foregoing aspects, a cell comprises the target nucleic acid molecule. In some embodiments of the foregoing aspects, the rate of mutagenic end joining is not increased. In some embodiments of the foregoing aspects, the rate of mutagenic end joining is not altered. In some embodiments of the foregoing aspects, the method further comprises generating a nick in the transcribed strand of the target nucleic acid molecule. In some embodiments of the foregoing aspects, the nickase is selected from the group consisting of: a nuclease with one active site disabled; I-AniI with one active site disabled; or Cas9^{D10A}. In some embodiments of the foregoing aspects, the donor nucleic acid molecule is a ssDNA or nicked dsDNA. In some embodiments of the foregoing aspects, the donor nucleic acid molecule comprises a portion complementary to the strand of the target nucleic acid molecule that is not nicked by the nickase. In some embodiments of the foregoing aspects, the portion of the donor nucleic acid molecule that is complementary to a strand of the target nucleic acid molecule is substantially centered with respect to the location of the nick.

[0012] In one aspect, described herein is a method of modifying the sequence of a target nucleic acid molecule, the method comprising contacting the target nucleic acid molecule with a) a ssDNA donor nucleic acid molecule comprising the modification to be made in the target nucleic acid molecule; b) a nuclease; and c) an inhibitor of RAD51; BRCA2; PALB2 or SHFM1. In some embodiments, a cell-free system comprises the target nucleic acid molecule. In some embodiments, a cell comprises the target nucleic acid molecule. In some embodiments, the rate of mutagenic end joining is not increased. In some embodiments, the rate of mutagenic end joining is not altered. In some embodiments, the donor nucleic acid molecule comprises a portion complementary to one strand of the target nucleic acid molecule. In some embodiments, the nuclease is selected from the group consisting of: nucleases comprising a FokI cleavage domain; zinc finger nucleases; TALE nucleases; RNA-guided engineered nucleases; Cas9; Cas9-derived nucleases; and homing endonucleases.

[0013] In some embodiments of the foregoing aspects, the modification is introduced as a gene therapy. In some embodiments of the foregoing aspects, the inhibitor is an inhibitory nucleic acid. In some embodiments of the foregoing aspects, the inhibitor is an antibody reagent. In some embodiments of the foregoing aspects, the inhibitor is selected from the group consisting of: IBR2; RI-1; RI-2; and B02. In some embodiments of the foregoing aspects, the donor nucleic acid molecule is at least about 25 nt in length. In some embodiments of the foregoing aspects, the donor nucleic acid molecule is at least about 50 nt in length. In some embodiments of the foregoing aspects, the method further comprises the step of implanting a cell comprising the modified nucleic acid molecule into a subject. In some embodiments of the foregoing aspects, the cell is autologous to the subject. In some embodiments of the foregoing aspects, the cell is an iPS cell. In some embodiments of the foregoing aspects, the modification corrects a mutation. In some embodiments of the foregoing aspects, the modification introduces a mutation. In some embodiments of the foregoing aspects, the modification causes improved cell function. In some embodiments of the foregoing aspects, the modification is selected from the group consisting of: modification of a viral gene and modification of a gene comprising a dominant negative mutation.

[0014] In one aspect, described herein is a method of decreasing genomic instability in a cell, the method comprising contacting the cell with an agonist of RAD51; BRCA2; PALB2 or SHFM1 or an inhibitor of BRCA1. In some embodiments, the agonist is a nucleic acid encoding RAD51; BRCA2; PALB2 or SHFM1. In some embodiments, the inhibitor is an inhibitory nucleic acid. In some embodiments, the inhibitor is an antibody reagent. In some embodiments, the cell is a cancerous cell. In some embodiments, the genomic instability is a loss of heterozygosity. In some embodiments, the contacting step comprises administering the agonist or inhibitor to a subject in need of treatment for a risk of genomic instability. In some embodiments, the subject is a subject with cancer.

[0015] In one aspect, described herein is a kit comprising: a nuclease or a nickase; and an inhibitor of RAD51; BRCA2; PALB2 or SHFM1. In some embodiments, the kit can further comprise a donor nucleic acid molecule. In some embodiments, the donor nucleic acid molecule is a single-stranded nucleic acid molecule. In some embodiments, the nickase is selected from the group consisting of: a nuclease with one active site disabled; I-AniI with one active site disabled; or Cas9^{D10A}. In some embodiments, the nuclease is selected from the group consisting of nucleases comprising a FokI cleavage domain; zinc finger nucleases; TALE nucleases: RNA-guided engineered nucleases; Cas9; Cas9-derived nucleases: and homing endonucleases. In some embodiments, the inhibitor is an inhibitory nucleic acid. In some embodiments, the inhibitor is an antibody reagent. In some embodiments, the inhibitor is selected from the group consisting of IBR2; RI-1; RI-2; and B02. In some embodiments, the kit can further comprise a cell extract.

### BRIEF DESCRIPTION OF THE DRAWINGS

[0016] FIGS. 1A-1F depicts efficient HDR at transcribed strand nicks. FIG. 1A depicts a diagram of the TL^{TP} and TL^{NT} reporters, nicked by I-AniI nickase on the transcribed (orange, labeled “bottom”; and non-transcribed strands (blue, labeled top) strands; nicks are indicated by arrowhead). FIG. 1B depicts a diagram of the chromosomal I-AniI Traffic Light (TL) reporter⁹ consisting of a defective GFP gene containing an I-AniI site (arrowheads) and two stop codons (asterisks) near the 5′-end, joined by a T2A translational linker to the mCherry coding sequence in the +2 open reading frame (ORF). The I-AniI site is oriented to nick the transcribed strand in the TL^{TP} reporter and the non-transcribed strand in the TL^{NT} reporter, as indicated by the two arrowheads. GFP+ cells will result from HDR of the chromosomal reporter using an exogenous donor; while mCherry+ cells will result from cleavage at the I-AniI site followed by mutagenic end joining that puts mCherry in the +2 reading frame. FIG. 1C depicts graphs of a representative flow assay of HDR (GFP+) and mutagenic end joining (EJ) (mCherry+) cells generated following transient transfection of 293T-TL^{TP} and 293T-TL^{NT} cells with constructs expressing catalytically inactive I-AniI (I-AniIDEAD) or I-AniI nickase (Nick) or cleavase (DSB), and the dsDNA plasmid donor pCS14GFP, which bears a 3′-truncated defective GFP gene and 2.47 kb of upstream and 0.56 kb of downstream homology with the chromosomal reporter. FIG. 1D depicts graphs of HDR (GFP+) frequencies following multiple independent transient transfections of 293T-TL^{TP} or 293T-TL^{NT} cells, one set of which is shown in panel Cc; n=2 (I-AniIDEAD) or 4 (nicks and DSBs). At DSBs, the difference between HDR frequencies at the TL^{TP} and TL^{NT} reporters are statistically significant at nicks (p<0.005) but not statistically significant at DSBs (p=0.23). FIG. 1E depicts a diagram of the chromosomal P-Tet-TL reporter, which carries a tetracycline-inducible promoter (P-Tet) upstream of the defective GFP repair target. FIG. 1F depicts graphs of normalized HDR frequencies, based on pooled results from a total of 11 independent transfections of three different clonal 293-P-Tet-TL^{TP} or 293-P-Tet-TL^{NT} cell lines carried out in the absence (OFF) or presence (ON) of 1 μg/ml doxycycline. Frequencies for each line were normalized to the OFF frequency independently for nicks and DSBs. Analyses of individual lines are shown in FIG. 7. FIGS. 1D and 1F present the mean and standard error of the mean (SEM); * and ** indicates p<0.05 and p<0.005, respectively.

[0017] FIGS. 2A-2C demonstrate donor use and donor strand bias of HDR at nicks. FIG. 2A depicts a diagram of TL^{TP} and TL^{NT} reporters, and 99 nt ssDNA oligonucleotide donors 99-TOP and 99-BOT centered at the nick and identical to top or bottom strand except for the indicated 17 nt region of heterology for replacement of the stop codons and I-AniI site with GPF coding sequence. Lettering is color-coded to match transcribed (stippled) or non-transcribed (white) strands. FIG. 2B depicts graphs of HDR (GFP+) frequencies at nicks or DSBs, using the 99-TOP or 99-BOT ssDNA donors, in 293T-TL^{TP}-7 and HT1080 TL^{TP}-4 clonal lines. FIG. 2C depicts graphs of HDR (GFP+) frequencies at nicks or DSBs, using the 99-TOP or 99-BOT ssDNA donors, in 293T-TL^{NT} and 293T-TL^{TP} cell populations. FIGS. 2B and 2C present the mean and SEM of at least five transfections; * and ** indicate p<0.05 and p<0.005, respectively.

[0018] FIGS. 3A-3H demonstrate that downregulation or inhibition of RAD51 stimulates HDR at nicks by ssDNA donors. FIGS. 3A-3B depict graphs of HDR (GFP+) frequencies at nicks or DSBs, using the pCS14GFP dsDNA donor or 99-TOP or 99-BOT ssDNA donors, in the 293T-TL^{TP}-7 clonal line treated with siRAD51 (FIG. 3A) or transiently expressing the RAD51K133R dominant negative mutant (FIG. 3B). FIG. 3C depicts graphs of HDR (GFP+) frequencies at nicks, using the ds DNA donor or 99-TOP or 99-BOT ss DNA donors, in 293T-TL^{NT} and 293T-TL^{TP} cell populations. FIG. 3D depicts graphs of HDR (GFP+) frequencies at nicks or DSBs in the 293T-TL^{TP}-7 clonal line treated with siBRCA2, using ds or BOT donors described in FIG. 3A. FIG. 3E depicts graphs of mutagenic EJ (mCherry+) frequencies at nicks or DSBs, using the dsDNA donor or 99-TOP or 99-BOT ssDNA donors, in the 293T-TL^{TP}-7 clonal line transiently expressing the RAD51K133R dominant negative mutant. FIG. 3F depicts a graph of the ratio of HDR to mutagenic EJ (% GFP:% mCherry cells) in the 293T-TL^{TP}-7 clonal line. Data were compiled from transfections carried out under optimal HDR conditions for nicks (transcribed-strand nick, bottom strand donor, RAD51 inhibited) or DSBs (dsDNA donor). FIG. 3G depicts a diagram of donors used to compare HDR by intact (pG-no) dsDNA or dsDNA carrying an I-AniI site oriented for nicking the transcribed (pGAn-TP) or non-transcribed (pGAn-NT) DNA strand. The I-AniI site in pGAn-TP and pGAn-NT is approximately 500 bp downstream of the I-AniI site in the reporter GFP gene targeted for repair. These donors contain 0.1 kb of upstream and 0.49 kb of downstream homology with the chromosomal reporter (see FIGS. 5A-5E). FIG. 3H depicts graphs of HDR (GFP+) frequencies at nicks, using the dsDNA donors shown in FIG. 3G which lack I-AniI sites or carry a site oriented for nicking the non-transcribed (NT) or transcribed (TP) DNA strand. Mean and SEM of at least five transfections; * and ** indicate p<0.05 and p<0.005, respectively. FIGS. 4A-4B depict pathways of HDR at nicks.

[0019] FIGS. 4A-4B depict diagrams of TL^{TP} and TL^{NT} reporters, and 75 nt ssDNA donors with 17 nt region of heterology, and flanking sequences of indicated lengths identical to top (white) or bottom (stippled) strand. Pooled 293T cells bearing the either the TL^{TP} or TL^{NT} reporter, as indicated, and transiently expressing RAD51K133R, were provided with a 75 nt donor centered at the nick (black) or extending to either side of the nick, as shown. Graphs show HDR frequencies normalized to the donor centered at the nick, and represent mean and SEM of at least seven transfections. FIG. 4B depicts diagrams of the working model for repair at nicks. Nicks at a target site (black) may be repaired by direct religation 1, which produces no genetic signature; canonical HDR4, 25; or alternative HDR or mutagenic EJ, as shown. A gap is formed by unwinding or nucleolytic processing, shown to occur in the 3′-5′ direction that appears predominant based on results in FIG. 4A. ssDNA partially heterologous to the target (indicated by loops on both strands) anneals to the gap. Heterology is corrected and the donor may be released (left). DNA ends are processed and ligation generates an intact repaired duplex. Note that the donor may be released from a nicked duplex by unwinding, left; or derive from free ssDNA, center; and that a free ssDNA molecule may be the transcribed for correction of heterology, as shown; or it may be incorporated into the gapped molecule for repair subsequent to replication (not shown). Mutagenic EJ may occur if replication forks collide at the processed nick to generate a one-sided DSB (right).

[0020] FIGS. 5A-5E demonstrate targets for endonucleolytic cleavage and repair in TL reporters. FIG. 5A depicts diagrams of the TL^{TP} and TL^{NT} reporters, which are nicked by I-AniI nickase on the transcribed and non-transcribed strands (arrowhead) within a GFP gene disabled by two stop codons downstream of the I-AniI site (asterisks). FIG. 5B depicts the sequences of the regions in the TL^{TP} (SEQ ID NO: 208) and TL^{NT} (SEQ ID NO: 209) reporters that includes the ATG translational start site, the I-AniI site (boxed) and two stop codons (dashed boxes underlined). The I-AniI site is flipped in orientation in the TL^{TP} and TL^{NT} reporters. Arrowheads indicate sites of non-transcribed and transcribed strand nicks; the corresponding DSBs have a 4 nt 3′-overhang. The 38 bp insertion in the GFP gene (small letters) that includes the I-AniI site and two nonsense codons is replaced during HDR. Donors carry a 17 nt region heterologous to this insertion (lowercase), flanked by homologous sequence (uppercase). FIG. 5C depicts a diagram of pCS14GFP HDR donor, which carries a defective GFP gene with a deletion of 3′-sequence (X), and shares homology with the TL reporters extending 2.47 kb upstream and 0.56 kb downstream of the 38 bp insertion bearing the I-AniI site. FIG. 5D depicts a diagram of pG-no and pG-An HDR donors, which carry a GFP gene rendered defective by 3′ insertion. pG-no carries two 3′ stop codons (asterisks); pG-An donors carry a single stop codon, and a site for either transcribed (pG-An-TP) or non-transcribed (pG-An-NT) strand nicking by I-AniI (arrowheads), at a position approximately 500 bp downstream of the I-AniI site in the GFP repair target gene. FIG. 5E depicts sequences of the insertions in the pG-no and pG-An HDR donors. pG-no (SEQ ID NO: 210) carries two in-frame stop codons (dashed boxes, underlined); and pG-An-TP (SEQ ID NO: 211) and pG-An-NT (SEQ ID NO: 212) carry an I-AniI site (boxed) and a single in-frame stop codon (dashed boxes, underlined). Homology of the pG donors with the TL reporters extends 0.1 kb upstream and 0.49 kb downstream of the 38 bp insertion in the reporter that includes the I-AniI site. I-AniI sites are boxed, and insertions that interrupt GFP are shown in lower case.

[0021] FIG. 6 demonstrates that HDR does not occur upon I-AniI expression in the absence of a repair donor. Representative flow assay of HDR (GFP+) and mutagenic EJ (mCherry+) frequencies following transient transfection of 293T-TL^{TP} and 293T-TL^{NT} cell populations with constructs expressing catalytically inactive I-AniI (I-AniIDEAD) or I-AniI nickase or cleavase, in the absence of repair donor.

[0022] FIGS. 7A-7B demonstrates that induction of transcription stimulates HDR at transcribed strand nicks in individual cell lines. Mean HDR (GFP+) frequencies observed following 3 independent transient transfections of 3 different 293-P-Tet-TL^{TP} or 293-P-Tet-TL^{NT} clonal cell lines. The mean and SEM are presented; * and ** indicate p<0.05 and p<0.005, respectively. Pooled data are shown in FIG. 1F.

[0023] FIG. 8 demonstrates RAD51 independence of nick-initiated HDR in the HT1080-TL4 cell line. HDR (GFP+) frequencies at nicks or DSBs, using the pCS14GFP dsDNA donor or 99-TOP or 99-BOT ssDNA donors, in the HT1080-TL^{TP}-4 clonal line transiently expressing the RAD51K133R dominant negative mutant. The mean and SEM of 5 or 6 transfections are presented; * and ** indicate p<0.05 and p<0.005, respectively.

[0024] FIGS. 9A-9D demonstrate that HDR occurs preferentially at a transcribed strand nick and is stimulated by transcription. FIG. 9A depicts diagrams of the chromosomal I-AniI Traffic Light (TL) reporter (18) that consists of a defective GFP gene containing an I-AniI site and two stop codons (asterisks) near the 5′-end, joined by a T2A translational linker to the mCherry coding sequence in the +2 open reading frame (ORF). The I-AniI site is oriented to nick the transcribed strand in the TL^{TP} reporter and the non-transcribed strand in the TL^{NT} reporter, as indicated by the two arrowheads. GFP+ cells will result from HDR of the chromosomal reporter using an exogenous donor; while mCherry+ cells will result from cleavage at the I-AniI site followed by mutEJ that puts mCherry in the +2 reading frame. FIG. 9B depicts graphs of HDR (GFP+) and mutEJ (mCherry+) frequencies calculated from independent transient transfections of 293T-TL^{TP} or 293T-TL^{NT} cells (I-AniIDEAD; n=2; Nick, n=4; DSB, n=4), one example of which is shown in FIG. 9B. Mean and standard error of the mean (SEM) are shown. Differences in HDR between the two TL^{TP} and TL^{NT} cells are significant at nicks (** indicates p<0.005) but not at DSBs (p=0.23). FIG. 9C depicts graphs of HDR (GFP+) frequencies, based on pooled results from a total of 11 independent transfections of three different clonal 293-P-Tet-TL^{TP} or 293-P-Tet-TL^{NT} cell lines carried out in the absence (OFF) or presence (ON) of 1 μg/ml doxycycline, and normalized to frequencies for cells cultured without inducer. Cell lines were analyzed individually and frequencies for HDR at nicks or DSBs in each were normalized to frequencies for cells cultured without doxycycline (data not shown). FIG. 9D depicts a model diagramming how transcription may affect repair at a transcribed strand nick (TL^{TP}) by unwinding DNA to expose the recombinogenic 3′ end; but inhibit repair of a non-transcribed strand (TL^{NT}) by occluding the 3′ end and exposing the less recombinogenic 5′ end.

[0025] FIGS. 10A-10C demonstrate donor use and donor strand bias in HDR at nicks. FIG. 10A depicts diagrams of TL^{TP} and TL^{NT} reporters, with 99 nt ssDNA oligonucleotide donors complementary to the nicked (cN) or intact (cI) strand of each shown below. Donors were centered at the nick and complementary to the indicated strand except for a 17 nt region of heterology, containing GFP coding sequence which replaces the stop codons and I-AniI site in the reporter to enable GFP expression. FIG. 10B depicts grpahs of HDR (GFP+) frequencies at nicks or DSBs, using ssDNA donors complementary to the nicked (cN) or intact (cI) DNA strand, in 293T-TL7^{TP} and HT1080 TL4^{TP} clonal lines; mean and SEM calculated from at least 5 transfections; ** p<0.005. FIG. 10C depicts graphs of HDR (GFP+) frequencies at nicks or DSBs, using ssDNA donors complementary to the nicked (cN) or intact (cI) DNA strand, in 293T-TL^{NT} and 293T-TL^{TP} cell populations. Mean and SEM calculated from at least 5 transfections; * and ** indicate p<0.05 and p<0.005, respectively.

[0026] FIGS. 11A-11D demonstrate that downregulation of canonical HDR stimulates HDR at nicks by ssDNA or nicked dsDNA donors. FIG. 11A depicts graphs of HDR (GFP+) frequencies at nicks or DSBs in the 293T-TL7^{TP} clonal line treated with siRAD51, using the pCS14GFP dsDNA donor (n=4) or cN (n=2) or cI (n=4) ssDNA donors, as indicated. Mean and SEM are presented; * and ** indicate p<0.05 and p<0.005, respectively. FIG. 11B depicts graphs of HDR (GFP+) frequencies at nicks in 293T-TL^{NT} and 293T-TL^{TP} cell populations transiently expressing RAD51K133R, using indicated donors (n=4-6). FIG. 11C depicts graphs of HDR (GFP+) frequencies at nicks with the cI ssDNA donor or at DSBs with the dsDNA donor in the 293T-TL7^{TP} clonal line treated with the indicated siRNA (n=6-12). FIG. 11D depicts, on the left, a diagram of dsDNA donors, with no I-AniI site (pG-no) or carrying an I-AniI site oriented for intracellular nicking of the transcribed (pGAn-TP) or non-transcribed (pGAn-NT) strand. The I-AniI site in pGAn-TP and pGAn-NT is approximately 500 bp downstream of the I-AniI site in the reporter GFP gene targeted for repair. The donors contain 100 bp of upstream and 500 bp of downstream homology with the chromosomal reporter and the promoters are not homologous to the TL promoter (FIGS. 15A-15C). On the right is a graph of HDR (GFP+) frequencies at nicks in the 293T-TL7^{TP} clonal line transiently expressing the RAD51K133R dominant negative mutant with intact or nicked dsDNA donors (n=5); ** p<0.005.

[0027] FIGS. 12A-12D demonstrate that CRISPR/Cas9 generated nicks initiate alternative HDR and are associated with less mutEJ than are DSBs. FIG. 12A depicts sequence of the portion of the TL^{TP} reporter (SEQ ID NO: 213) containing CRISPR/Cas9 and I-AniI target sites (open and closed arrowheads). The insertion (lower case) bearing the I-AniI site and stop codons (underlined) and a portion of the GFP coding sequence (upper case) are shown. The CRISPR guide RNA and PAM sequence are indicated. FIG. 12B depicts graphs of HDR (GFP+) frequencies at nicks or DSBs in the 293T-TL7^{TP} clonal line following transient transfection of a Cas9D10A (Nick) or Cas9 (DSB) expression plasmid, the guide RNA expression plasmid and either the dsDNA plasmid donor pCS14GFP or cI and cN ssDNA donors, as indicated. Mean and SEM calculated from 3 transfections; ** indicates p<0.005. FIG. 12C depicts graphs of MutEJ (mCherry+) frequencies at nicks or DSBs in the 293T-TL7^{TP} clonal line; same cells as in FIG. 12B. FIG. 12D depicts graphs of the ratio of HDR to mutEJ (GFP+:mCherry+ cells) compiled from transfections of 293T-TL7^{TP} in FIG. 12B, analyzing HDR at template-strand nicks using the cI ssDNA donor in siBRCA2-treated cells; and HDR at DSBs using a dsDNA donor in untreated cells.

[0028] FIG. 13 demonstrates a relation between ssDNA donor homology and HDR at nicks. 293T-TL^{TP} (left) and 293T-TL^{NT} (right) cell populations, transiently expressing the I-AniI nickase and RAD51K133R, were provided with a 75 nt ssDNA donor centered at the nick or extending either 3′ or 5′ of the nick. ssDNA donors were complementary to the nicked (cN) or intact (cI) strands and carried a 17 nt region of heterology (dotted line), and homologous flanking sequences of indicated lengths. Graphs show HDR frequencies for donors extending either 3′ (light gray bar) or 5′ (dark gray bar) normalized to the donor centered at the nick (white bar), and represent mean and SEM of at least 7 transfections.

[0029] FIG. 14 depicts a working model for pathways of HDR at nicks. Left, RAD51-dependent HDR using a dsDNA donor. A gap is exposed at the nicked target, and BRCA2 loads RAD51 on the free 3′ end, enabling invasion of a homologous dsDNA donor, as in canonical DSB repair. Right, RAD51/BRCA2-independent HDR. A gap is exposed at the nicked target, and the donor anneals to either the nicked (left) or intact (right) strand of the duplex, independent of RAD51/BRCA2. Heterology (white boxes) and repair synthesis (dashed line) are shown. Arrowheads represent nucleolytic removal of DNA, either by excision or flap cleavage.

[0030] FIGS. 15A-15C demonstrate targets for endonucleolytic cleavage and repair in TL reporters. FIG. 15A depicts sequences of the regions in the TL^{TP} (SEQ ID NO: 208) and TL^{NT} (SEQ ID NO: 209) reporters that include the ATG translational start site, the I-AniI site (boxed) and two stop codons (underlined). The I-AniI site is flipped in orientation in the TL^{TP} and TL^{NT} reporters. Arrowheads indicate sites of non-transcribed and transcribed strand nicks; the corresponding DSBs have a 4 nt 3′-overhang. The 38 bp insertion in the GFP gene (small letters) that includes the I-AniI site and two nonsense codons is replaced during HDR. Donors carry a 17 nt region heterologous to this insertion (lowercase), flanked by homologous sequence (uppercase). FIG. 15B depicts diagrams of the TL^{TP} and TL^{NT} reporters, which are nicked by I-AniI nickase on the transcribed and non-transcribed strands (arrowhead) within a GFP gene disabled by two stop codons at the 5′-end, just downstream of the I-AniI site (asterisks). The pCS14GFP HDR donor carries a defective GFP gene with a deletion of 3′-sequence (X), and shares extensive homology with the TL reporters extending 2.5 kb upstream and 0.6 kb downstream of the 38 bp insertion bearing the I-AniI site. The pG-no and pG-An HDR donors carry a GFP gene rendered defective by 3′ insertion and share homology with the TL reporters extending 0.1 kb upstream and 0.6 kb downstream of the 38 bp insertion bearing the I-AniI site. pG-no carries two premature stop codons (asterisks); pG-An donors carry a single premature stop codon, and a site for either transcribed (pG-An-TP) or non-transcribed (pG-An-NT) strand nicking by I-AniI (arrowheads), at a position approximately 500 bp downstream of the I-AniI site in the GFP repair target gene. Homology of the pG donors with the TL reporters extends 0.1 kb upstream and 0.49 kb downstream of the 38 bp insertion in the reporter that includes the I-AniI site. FIG. 15C depicts sequences of the 3′ end of the GFP coding sequence from pEGFP-N1 (SEQ ID NO: 214) and the pG-no (SEQ ID NO: 215), pG-An-TP (SEQ ID NO: 216) and pG-An-NT (SEQ ID NO: 217) HDR donors. pG-no carries two premature stop codons; and pG-An-TP and pG-An-NT carry an I-AniI site and a single premature stop codon. The I-AniI sites are boxed, and stop codons are underlined.

[0031] FIGS. 16A-16B demonstrate that I-AniI nuclease activity and a repair donor are required to generate GFP+ cells. FIG. 16A depicts a representative flow cytometric assay of HDR (GFP+) and mutEJ (mCherry+) cells generated following transient transfection of 293T-TL^{TP} and 293T-TL^{NT} cell populations with constructs expressing catalytically inactive I-AniI (I-AniIDEAD) or I-AniI nickase (Nick) or cleavase (DSB), and the dsDNA plasmid donor pCS14GFP. FIG. 16B depicts a representative flow assay of HDR (GFP+) and mutEJ (mCherry+) cells generated following transient transfection of 293T-TL^{TP} and 293T-TL^{NT} cell populations with constructs expressing catalytically inactive I-AniI (I-AniIDEAD) or I-AniI nickase or cleavase, in the absence of repair donor.

[0032] FIGS. 17A-17C demonstrate that nick-iniated mutEJ is transcription-independent and occurs less frequently than DSB-initiated mutEJ. FIG. 17A depicts graphs of MutEJ (mCherry+) frequencies at nicks or DSBs in 293T-TL^{TP} and 293T-TL^{NT} cell populations expressing I-AniI nickase or cleavase; and the ratio of HDR:mutEJ (GFP+:mCherry+ cells). Mean and SEM calculated from 4 transfections; * and ** indicate p<0.05 and p<0.005, respectively. FIG. 17B depicts graphs of MutEJ (mCherry+) frequencies at nicks or DSBs in 293-P-Tet-TL^{TP} or 293-P-Tet-TL^{NT} cell lines cultured in the presence or absence of doxycycline; and normalized to frequencies for cells cultured without doxycycline (n=11). FIG. 17C depicts graphs of MutEJ (mCherry+) frequencies at (left) nicks or (middle) DSBs in the 293T-TL^{TP}-7 clonal line transiently expressing the RAD51K133R dominant negative mutant, using the dsDNA donor or the cN or cI ssDNA donors (n=3-6). The ratio (right) of HDR to mutagenic EJ (GFP+:mCherry+ cells) was compiled from transfections carried out under optimal HDR conditions for nicks (transcribed-strand nick, bottom strand donor, RAD51 inhibited) or DSBs (dsDNA donor).

[0033] FIGS. 18A-18B demonstrate that downregulation of RAD51 or BRCA2 stimulates HDR at nicks using ssDNA donors. FIG. 18A depicts graphs of HDR (GFP+) frequencies at nicks or DSBs, using the pCS14GFP dsDNA donor or cN or cI ssDNA donors, in the 293T-TL^{TP}-7 clonal line transiently expressing the RAD51K133R dominant negative mutant, (n=3-6). The mean and SEM of 5 or 6 transfections are presented; * and ** indicate p<0.05 and p<0.005, respectively. FIG. 18B depicts graphs of HDR (GFP+) frequencies at nicks or DSBs, using the indicated donors, in the HT1080-TL4^{TP} clonal line transiently expressing the RAD51K133R dominant negative mutant (n=5-6).

[0034] FIG. 19 depicts a working model for HDR using a ssDNA donor complementary to the intact strand (cI). A gap is exposed at the nicked target, shown to occur by a 3′-5′ helicase (unwinding, slanted line) and 5′-3′ nucleolytic resection (resection, dotted line), although this example is not meant to exclude the potential contribution of 5′-3′ unwinding or 3′-5′ excision to gap formation. The ssDNA donor complementary to the intact strand (cI; homology, black; heterology, white boxes) anneals to the gap, independent of RAD51/BRCA2. The donor can then be incorporated into the target and the heterology eliminated by mismatch repair (left); or, if DNA replication and mitosis occur prior to mismatch repair (MMR), heterology may instead be resolved by segregation (not shown). Alternatively, the donor may not be incorporated but direct mismatch repair and then be released by strand displacement accompanying repair synthesis, followed by ligation to generate an intact duplex at the target (right).

[0035] FIG. 20 depicts a diagram of a nicked dsDNA donor promoting HDR by acting as a template for repair synthesis. 1. Nicked target and nicked donor. Nicks are separated by 500 bp, and are shown on either the opposite (left) or same (right) strand as the donor nick; homology black, heterology, white boxes. 2. Unwinding occurs at the nicks in both the target and donor. If the donor and target nicks are on opposite strands (left) then the free 3′ end of the target strand anneals to the free 3′ end of the donor. If the donor and target nicks are on identical strands (right) then the free 3′ end of the target strand anneals to the intact strand of the donor. 3. The donor is used as a template for repair synthesis (dotted lines) primed by that 3′ end of the target. 4. Newly synthesized region is released from the donor template, then reanneals to the target, displacing a region carrying a 5′ flap, which is cleaved by endonucleases (arrowheads). 5. Following flap removal, ligation completes HDR. The mechanism of donor unwinding is unknown but is shown in the direction required to traverse the 500 bp between the regions of the nick in the target and donor (left, 3′-5′; right, 5′-3′); the experiments in FIG. 11D used a nicked plasmid (circular) donor so that unwinding of 4200 bp in the direction opposite to that shown might also allow productive annealing.

[0036] FIG. 21 depicts a diagram of a nicked dsDNA donor strand promoting HDR by directing mismatch repair. 1. Nicked target and nicked donor. Nicks are separated by 500 bp, and are shown on either the opposite (left) or same (right) strand as the donor nick; homology black, heterology, white boxes. 2. Unwinding initiates at the nicks in both the target and donor. If the donor and target nicks are on opposite strands (left) then the intact donor and target strands anneal. If the donor and target nicks are on the same strands (right), then the free 3′ end of the donor anneals to the exposed gap on the target. 3. The donor directs mismatch repair (MMR). 4. The 3′ end of the target nick primes DNA synthesis (dotted line). This may require or be accompanied by flap removal (arrowheads). 5. The donor is released from the target, and the target undergoes nucleolytic processing (arrowhead). 6. Following flap removal, ligation completes HDR. The mechanism of donor unwinding is unknown but is shown in the direction required to traverse the 500 bp between the regions of the nick in the target and donor (left, 5′-3′; right, 3′-5′); the experiments in FIG. 11D used a nicked plasmid (circular) donor so that unwinding of 4200 bp in the direction opposite to that shown might also allow productive annealing.

[0037] FIG. 22 depicts expression analysis of siRNA treated 293T-TL7^{TP} cells. cDNAs were synthesized at 48 hrs post siRNA transfection and used as template for PCR by primers directed against the indicated genes. Band intensities are given relative to the siNT2 band for each primer pair.

[0038] FIG. 23 depicts fractions of GFP+, mCherry+ and BFP+ cells among total live cells, and fractions of GFP+ and mCherry+ among BFP+ cells for each relevant figure panel. Mean and standard error of the mean (SEM) are shown below each data set. Two-tailed t-tests were used to determine the p-values that are displayed to the right of the raw data. For FIG. 13, the mean and SEM were converted to values relative to the raw values for the centered oligonucleotides.

[0039] FIG. 24 depicts graphs of the frequency of HDR at nicks using an ssDNA donor when the expression of the listed genes is inhibited.

[0040] FIG. 25 depicts a graph of the ratio of HDR to mutEJ at nicks when the expression of the listed genes is inhibited.

[0041] FIG. 26 depicts an exemplary embodiment of a “tagging” use of the methods described herein. The tagging of endogenous RECQL5 using alternative HDR is depicted. On top is a diagram of the 3′ end of genomic RECQL5-HA. Primer F3 is specific to the HA tagged locus. On the bottom nested PCT of genomic DNA from H1080 cells transfected with the indicated ssDNA donors and contructs expressing Cas9-D10A nickase, dominant negative RAD51, and either no gRNA, RECQL5-gRNA1 or RECQL5-gRNA2. First round of PCR: 25 cycles with primers F1 and R1 (not shown). Second round of PCR used either primers F2 and R2 (left) or F3 and R2 (right).

### DETAILED DESCRIPTION

[0042] DNA damage repair is a complex set of processes that detect and attempt to reverse damage and errors in the DNA sequence that arise from numerous causes. One type of damage is the physical interruption of the backbone (e.g. a cut or severing) of one or more strands of DNA, typically referred to as a “nick” if only one strand of a dsDNA molecule is severed and as a “double-strand break” (DSB) if both strands of a dsDNA molecule are severed. It is noted that for a break to occur, both strands must be broken at approximately the same location. While a DSB can be blunt ended or have either a 5′ or 3′ overhang, if the strands are each cleaved too far apart, the overhangs will continue to anneal to each other and exist as two nicks, not one DSB. The degree of proximity of the cleavage sites necessary to generate a break will vary, e.g. with the % G/C content of the sequences and the temperature and/or salt concentration. In some embodiments, the cleavage sites must be less than 10 nt from each other to generate a DSB, e.g., less than 10 nt, less than 9 nt, less than 8 nt, less than 7 nt, less than 6 nt, less than 5 nt, less than 4 nt, less than 3 nt, less than 2 nt, or at the same location.

[0043] One type of repair that cells use to address nicks and breaks is homology-directed repair (HDR). As used herein, “homology-directed repair” or “HDR” refers to the specialized form of DNA repair that takes place, for example, during repair of double-strand breaks in cells. This process requires nucleotide sequence homology, uses a “donor” molecule to template repair of a “target” molecule (i.e., the one that experienced the double-strand break), and can lead to the transfer of genetic information from the donor to the target. HDR can result in an alteration of the sequence of the target molecule (e.g., insertion, deletion, mutation), if the donor nucleic acid molecule differs from the target molecule and part or all of the sequence of the donor molecule is incorporated into the target DNA. In some embodiments, the process can repair a nick.

[0044] As described herein, the inventors have discovered that there are in fact two separate HDR mechanisms; canonical HDR and alternative HDR. Canonical HDR has been studied at DSBs and requires BRCA2 and RAD51, and typically employs a dsDNA donor molecule. In contrast, “alternative HDR” is an HDR mechanism that is suppressed by BRCA2, RAD51, and functionally-related genes (see, e.g. Table 1). Alternative HDR uses a ssDNA or nicked dsDNA donor molecule. In some embodiments, alternative HDR is positively regulated by BRCA1 and/or requires BRCA1. Alternative HDR is demonstrated herein to have a lower error rate than canonical HDR. Accordingly, provided herein are methods for inducing or suppressing alternative HDR, e.g. to permit improved genetic modification or to reduce genomic instability, e.g. in a cancer.

[0045] In some embodiments, canonical HDR has an error rate at least about 2× that of alternative HDR. In some embodiments, canonical HDR has an error rate at least about 3× that of alternative HDR. In some embodiments, canonical HDR has an error rate at least about 4× that of alternative HDR. In some embodiments, canonical HDR has an error rate at least about 5× that of alternative HDR.

[0046] In one aspect, described herein is a method of increasing alternative homology-directed repair (alternative HDR) at a target nucleic acid (e.g. DNA) nick, the method comprising contacting the nucleic acid with an inhibitor of a gene expression product of a gene selected from Table 1. In some embodiments, a cell-free system comprises the target nucleic acid molecule, e.g. the target nucleic acid molecule is present in a cell extract or a subcellular fraction. In one aspect, described herein is a method of increasing alternative homology-directed repair (alternative HDR) at a nucleic acid (e.g. DNA) nick in a cell, the method comprising contacting the cell with an inhibitor of a gene expression product of a gene selected from Table 1. In some embodiments, the inhibitor is an inhibitor of RAD51; BRCA2; PALB2 and/or SHFM1. Increasing alternative HDR can refer to, e.g. increasing the speed with which a particular nick or break is repaired by alternative HDR, and/or increasing the percentage of nicks or breaks repaired by alternative HDR instead of other damage repair pathways (e.g. canonical HDR). The methods can also increase the efficiency of targeted gene modification, as discussed herein.

[0047] As demonstrated herein, inhibition of BRCA2-related activity increases alternative HDR. The genes of Table 1 promote BRCA2 activity. It is therefore specifically contemplated herein that inhibition of one or more of these genes increases alternative HDR. In some embodiments, the methods described herein can relate to the inhibition (or in some aspects, activation) of one or more genes selected from Table 1, e.g. one gene, two genes, three genes, four genes, or any number of genes selected from Table 1 as described herein.

[0048] In some embodiments, the methods described herein relate to inhibition (or in some aspects, activation) of one or more of RAD51; BRCA2; PALB2 and/or SHFM1. In some embodiments, the methods described herein relate to inhibition (or in some aspects, activation) of RAD51. In some embodiments, the methods described herein relate to inhibition (or in some aspects, activation) of BRCA2. In some embodiments, the methods described herein relate to inhibition (or in some aspects, activation) of PALB2. In some embodiments, the methods described herein relate to inhibition (or in some aspects, activation) of SHFM1. In some embodiments, the methods described herein relate to inhibition (or in some aspects, activation) of RAD51 and BRCA2. In some embodiments, the methods described herein relate to inhibition (or in some aspects, activation) of RAD51 and PALB2. In some embodiments, the methods described herein relate to inhibition (or in some aspects, activation) of RAD51 and SHFM1. In some embodiments, the methods described herein relate to inhibition (or in some aspects, activation) of BRCA2 and PALB2. In some embodiments, the methods described herein relate to inhibition (or in some aspects, activation) of BRCA2 and SHFM1. In some embodiments, the methods described herein relate to inhibition (or in some aspects, activation) of PALB2 and SHFM1. In some embodiments, the methods described herein relate to inhibition (or in some aspects, activation) of RAD51, BRCA2, and PALB2. In some embodiments, the methods described herein relate to inhibition (or in some aspects, activation) of RAD51, BRCA2, and SHFM1. In some embodiments, the methods described herein relate to inhibition (or in some aspects, activation) of RAD51, PALB2, and SHFM1. In some embodiments, the methods described herein relate to inhibition (or in some aspects, activation) of BRCA2, PALB2, and SHFM1. In some embodiments, the methods described herein relate to inhibition (or in some aspects, activation) of RAD51, PALB2, SHFM1, and BRAC2.

[0049] As used herein, the term “RAD51” refers to a protein that forms a helical nucleoprotein filament on DNA and controls the homology search and strand pairing of DNA damage repair. Sequences for RAD51 polypeptides and nucleic acids encoding them for a number of species are known in the art, e.g. human RAD51 (NCBI Gene ID: 5888) polypeptide (SEQ ID NO: 144; NCBI Ref Seq: NP_{—}001157741) and nucleic acid (SEQ ID NO: 058; NCBI Ref Seq: NM_{—}001164269).

[0050] As used herein, the term “BRCA2” refers to a tumor suppressor gene product that normally functions by binding single-stranded DNA at DNA damage sites and interacting with RAD51 to promote strand invasion. Sequences for BRCA2 polypeptides and nucleic acids encoding them for a number of species are known in the art, e.g. human BRCA2 (NCBI Gene ID: 675) polypeptide (SEQ ID NO: 095; NCBI Ref Seq: NP_{—}000050) and nucleic acid (SEQ ID NO: 009; NCBI Ref Seq: NM_{—}000059).

[0051] As used herein, the term “SHFM1” refers to a 26S proteasome complex subunit that interacts directly with BRCA2. Sequences for SHFM1 polypeptides and nucleic acids encoding them for a number of species are known in the art, e.g. human SHFM1 (NCBI Gene ID: 7979) polypeptide (SEQ ID NO: 152; NCBI Ref Seq: NP_{—}006295) and nucleic acid (SEQ ID NO: 066; NCBI Ref Seq: NM_{—}006304).

[0052] As used herein, the term “PALB2” refers to a DNA-binding protein that binds to single-strand DNA and facilitates accumulation of BRCA2 at the site of DNA damage. PALB2 also interacts with RAD51 to promote strand invasion. Sequences for PALB2 polypeptides and nucleic acids encoding them for a number of species are known in the art, e.g. human PALB2 (NCBI Gene ID: 79728) polypeptide (SEQ ID NO: 132; NCBI Ref Seq: NP_{—}078951) and nucleic acid (SEQ ID NO: 046; NCBI Ref Seq: NM 024675).

TABLE 1
Genes/Gene Product the Promote BRCA2 Activity

| | NCBI | mRNA | |
|---|---|---|---|
| | Gene ID | SEQ ID | Polypeptide |
| Gene Name | NO: | NO: | SEQ ID NO: |
| ABL1 | 25 | 001 | 087 |
| ATM | 472 | 002 | 088 |
| ATR | 545 | 003 | 089 |
| AURKB | 9212 | 004 | 090 |
| BACH1 | 571 | 005 | 091 |
| BARD1 | 580 | 006 | 092 |
| BCCIP | 56647 | 007 | 093 |
| BLM | 641 | 008 | 094 |
| BRCA2 | 675 | 009 | 095 |
| BRCC3 | 79184 | 010 | 096 |
| BRE | 9577 | 011 | 097 |
| BUB1B | 701 | 012 | 098 |
| C11orf30 | 56946 | 013 | 099 |
| CCNA2 | 890 | 014 | 0100 |
| CDC45 | 8318 | 015 | 0101 |
| CDK1 | 983 | 016 | 0102 |
| CDK2 | 1017 | 017 | 0103 |
| CDK4 | 1019 | 018 | 0104 |
| CHEK1 | 1111 | 019 | 0105 |
| CHEK2 | 11200 | 020 | 0106 |
| DMC1 | 11144 | 021 | 0107 |
| ECD | 11319 | 022 | 0108 |
| FANCD2 | 2177 | 023 | 0109 |
| FANCE | 2178 | 024 | 0110 |
| FANCG | 2189 | 025 | 0111 |
| FANCI | 55215 | 026 | 0112 |
| FLNA | 2316 | 027 | 0113 |
| FYN | 2534 | 028 | 0114 |
| GRB2 | 2885 | 029 | 0115 |
| H2AFX | 3014 | 030 | 0116 |
| HDAC1 | 3065 | 031 | 0117 |
| HDAC2 | 3066 | 032 | 0118 |
| HMG20B | 10362 | 033 | 0119 |
| KAT2B | 8850 | 034 | 0120 |
| KIF4A | 24137 | 035 | 0121 |
| LMNA | 4000 | 036 | 0122 |
| MCPH1 | 79648 | 037 | 0123 |
| MGMT | 4255 | 038 | 0124 |
| MLH1 | 4292 | 039 | 0125 |
| MLH3 | 27030 | 040 | 0126 |
| MND1 | 84057 | 041 | 0127 |
| MORF4L1 | 10933 | 042 | 0128 |
| MRE11A | 4361 | 043 | 0129 |
| MSH4 | 4438 | 044 | 0130 |
| MTA2 | 9219 | 045 | 0131 |
| PALB2 | 79728 | 046 | 0132 |
| PCNA | 5111 | 047 | 0133 |
| PDS5B | 23047 | 048 | 0134 |
| PLK1 | 5347 | 049 | 0135 |
| PMS1 | 5378 | 050 | 0136 |
| PMS2 | 5395 | 051 | 0137 |
| PSMC3IP | 29893 | 052 | 0138 |
| PSMD3 | 5709 | 053 | 0139 |
| PSMD6 | 9861 | 054 | 0140 |
| RAD21 | 5885 | 055 | 0141 |
| RAD23A | 5886 | 056 | 0142 |
| RAD50 | 10111 | 057 | 0143 |
| RAD51 | 5888 | 058 | 0144 |
| RAD51B | 5890 | 059 | 0145 |
| RAD51C | 5889 | 060 | 0146 |
| RBBP8 | 5932 | 061 | 0147 |
| RPA1 | 6117 | 062 | 0148 |
| RPA2 | 6118 | 063 | 0149 |
| RPA3 | 6119 | 064 | 0150 |
| SERPINH1 | 871 | 065 | 0151 |
| SHFM1 | 7979 | 066 | 0152 |
| SIRT1 | 23411 | 067 | 0153 |
| SIRT2 | 22933 | 068 | 0154 |
| SKP2 | 6502 | 069 | 0155 |
| SMAD1 | 4086 | 070 | 0156 |
| SMAD2 | 4087 | 071 | 0157 |
| SMAD3 | 4088 | 072 | 0158 |
| SMC3 | 9126 | 073 | 0159 |
| SP1 | 6667 | 074 | 0160 |
| SPO11 | 23626 | 075 | 0161 |
| STAT5A | 6776 | 076 | 0162 |
| SYCP3 | 50511 | 077 | 0163 |
| TEX15 | 56154 | 078 | 0164 |
| TOP3A | 7156 | 079 | 0165 |
| TP53 | 7157 | 080 | 0166 |
| UBC | 7316 | 081 | 0167 |
| UQCC1 | 55245 | 082 | 0168 |
| USP11 | 8237 | 083 | 0169 |
| WDR16 | 146845 | 084 | 0170 |
| XRCC3 | 7517 | 085 | 0171 |

[0053] The gene names listed in Table 1 are common names. The sequences and NCBI Gene ID numbers provided for each gene listed in Table 1 are the human sequences and accessions. Homologous genes from other species may be readily identified, e.g. the identified homologs in the NCBI database, or by querying databases, e.g. via BLAST.

[0054] As used herein, the term “inhibitor” refers to an agent which can decrease the expression and/or activity of the targeted expression product (e.g. mRNA encoding the target or a target polypeptide), e.g. by at least 10% or more, e.g. by 10% or more, 50% or more, 70% or more, 80% or more, 90% or more, 95% or more, or 98% or more. The efficacy of an inhibitor of, for example, BRCA2, e.g. its ability to decrease the level and/or activity of BRCA2, can be determined, e.g. by measuring the level of an expression product of BRCA2 and/or the activity of BRCA2 (e.g. the ability of BRCA2 to suppress alternative HDR). Methods for measuring the level of a given mRNA and/or polypeptide are known to one of skill in the art, e.g. RTPCR can be used to determine the level of RNA and Western blotting with an antibody (e.g. an anti-BRCA2 antibody, e.g. Cat No. ab97; Abcam; Cambridge, Mass.) can be used to determine the level of a polypeptide. The activity of, e.g. BRCA2 can be determined using methods known in the art and described in the Examples herein (e.g. assays to measure the rate of alternative HDR). In some embodiments, the inhibitor can be an inhibitory nucleic acid; an aptamer; an antibody reagent; an antibody; or a small molecule. In some embodiments, the inhibitor of a target can be an inhibitor specific for that target (e.g. a RAD51-specific inhibitor, a BRCA2-specific inhibitor, a PALB2-specific inhibitor, and/or a SHFM1-specific inhibitor). An inhibitor specific for a given target is an inhibitor which binds specifically to the target molecule (e.g. a mRNA or a polypeptide).

[0055] In some embodiments, an inhibitor will directly bind to the targeted factor, e.g. BRCA2 or to its mRNA. In some embodiments, an inhibitor will directly result in the cleavage of the targeted factor's mRNA, e.g., via RNA interference. In some embodiments, an inhibitor can act in a competitive manner to inhibit activity of the targeted factor. In some embodiments, an inhibitor can comprise a portion of the target factor and act as a competitive or dominant negative factor for interactions normally involving the targeted factor.

[0056] In some embodiments, the methods described herein can comprise contacting the cell with two or more inhibitors, e.g. two inhibitors, three inhibitors, four inhibitors, or more inhibitors. In some embodiments, the methods described herein can comprise contacting the cell with a plurality of inhibitors, e.g. an inhibitor of RAD51 and an inhibitor of BRCA2. In some embodiments, an inhibitor can inhibit multiple targets, e.g. an antibody reagent with bispecificity. In some embodiments, multiple types of inhibitors can be used, e.g. an antibody reagent specific for BRCA2 and a small molecule inhibitor of RAD51.

[0057] In some embodiments, an inhibitor of a gene expression product of a gene of Table 1 can be an inhibitory nucleic acid. In some embodiments, the inhibitory nucleic acid is an inhibitory RNA (iRNA). Double-stranded RNA molecules (dsRNA) have been shown to block gene expression in a highly conserved regulatory mechanism known as RNA interference (RNAi). The inhibitory nucleic acids described herein can include an RNA strand (the antisense strand) having a region which is 30 nucleotides or less in length, i.e., 15-30 nucleotides in length, generally 19-24 nucleotides in length, which region is substantially complementary to at least part of the targeted mRNA transcript. The use of these iRNAs permits the targeted degradation of mRNA transcripts, resulting in decreased expression and/or activity of the target.

[0058] As used herein, the term “iRNA” refers to an agent that contains RNA as that term is defined herein, and which mediates the targeted cleavage of an RNA transcript via an RNA-induced silencing complex (RISC) pathway. In one embodiment, an iRNA as described herein effects inhibition of the expression and/or activity of a gene selected from Table 1. In certain embodiments, contacting a cell with the inhibitor (e.g. an iRNA) results in a decrease in the target mRNA level in a cell by at least about 5%, about 10%, about 20%, about 30%, about 40%, about 50%, about 60%, about 70%, about 80%, about 90%, about 95%, about 99%, up to and including 100% of the target mRNA level found in the cell without the presence of the iRNA.

[0059] In some embodiments, the iRNA can be a dsRNA. A dsRNA includes two RNA strands that are sufficiently complementary to hybridize to form a duplex structure under conditions in which the dsRNA will be used. One strand of a dsRNA (the antisense strand) includes a region of complementarity that is substantially complementary, and generally fully complementary, to a target sequence. The target sequence can be derived from the sequence of an mRNA formed during the expression of the target. The other strand (the sense strand) includes a region that is complementary to the antisense strand, such that the two strands hybridize and form a duplex structure when combined under suitable conditions. Generally, the duplex structure is between 15 and 30 inclusive, more generally between 18 and 25 inclusive, yet more generally between 19 and 24 inclusive, and most generally between 19 and 21 base pairs in length, inclusive. Similarly, the region of complementarity to the target sequence is between 15 and 30 inclusive, more generally between 18 and 25 inclusive, yet more generally between 19 and 24 inclusive, and most generally between 19 and 21 nucleotides in length, inclusive. In some embodiments, the dsRNA is between 15 and 20 nucleotides in length, inclusive, and in other embodiments, the dsRNA is between 25 and 30 nucleotides in length, inclusive. As the ordinarily skilled person will recognize, the targeted region of an RNA targeted for cleavage will most often be part of a larger RNA molecule, often an mRNA molecule. Where relevant, a “part” of an mRNA target is a contiguous sequence of an mRNA target of sufficient length to be a substrate for RNAi-directed cleavage (i.e., cleavage through a RISC pathway). dsRNAs having duplexes as short as 9 base pairs can, under some circumstances, mediate RNAi-directed RNA cleavage. Most often a target will be at least 15 nucleotides in length, preferably 15-30 nucleotides in length.

[0060] In yet another embodiment, the RNA of an iRNA, e.g., a dsRNA, is chemically modified to enhance stability or other beneficial characteristics. The nucleic acids may be synthesized and/or modified by methods well established in the art, such as those described in “Current protocols in nucleic acid chemistry,” Beaucage, S. L. et al. (Edrs.), John Wiley & Sons, Inc., New York, N.Y., USA, which is hereby incorporated herein by reference. Modifications include, for example, (a) end modifications, e.g., 5′ end modifications (phosphorylation, conjugation, inverted linkages, etc.), 3′ end modifications (conjugation, DNA nucleotides, inverted linkages, etc.), (b) base modifications, e.g., replacement with stabilizing bases, destabilizing bases, or bases that base pair with an expanded repertoire of partners, removal of bases (abasic nucleotides), or conjugated bases, (c) sugar modifications (e.g., at the 2′ position or 4′ position) or replacement of the sugar, as well as (d) backbone modifications, including modification or replacement of the phosphodiester linkages. Specific examples of RNA compounds useful in the embodiments described herein include, but are not limited to RNAs containing modified backbones or no natural internucleoside linkages. RNAs having modified backbones include, among others, those that do not have a phosphorus atom in the backbone. For the purposes of this specification, and as sometimes referenced in the art, modified RNAs that do not have a phosphorus atom in their internucleoside backbone can also be considered to be oligonucleosides. In particular embodiments, the modified RNA will have a phosphorus atom in its internucleoside backbone.

[0061] Modified RNA backbones can include, for example, phosphorothioates, chiral phosphorothioates, phosphorodithioates, phosphotriesters, aminoalkylphosphotriesters, methyl and other alkyl phosphonates including 3′-alkylene phosphonates and chiral phosphonates, phosphinates, phosphoramidates including 3′-amino phosphoramidate and aminoalkylphosphoramidates, thionophosphoramidates, thionoalkylphosphonates, thionoalkylphosphotriesters, and boranophosphates having normal 3′-5′ linkages, 2′-5′ linked analogs of these, and those) having inverted polarity wherein the adjacent pairs of nucleoside units are linked 3′-5′ to 5′-3′ or 2′-5′ to 5′-2′. Various salts, mixed salts and free acid forms are also included. Representative U.S. patents that teach the preparation of the above phosphorus-containing linkages include, but are not limited to, U.S. Pat. Nos. 3,687,808; 4,469,863; 4,476,301; 5,023,243; 5,177,195; 5,188,897; 5,264,423; 5,276,019; 5,278,302; 5,286,717; 5,321,131; 5,399,676; 5,405,939; 5,453,496; 5,455,233; 5,466,677; 5,476,925; 5,519,126; 5,536,821; 5,541,316; 5,550,111; 5,563,253; 5,571,799; 5,587,361; 5,625,050; 6,028,188; 6,124,445; 6,160,109; 6,169,170; 6,172,209; 6,239,265; 6,277,603; 6,326,199; 6,346,614; 6,444,423; 6,531,590; 6,534,639; 6,608,035; 6,683,167; 6,858,715; 6,867,294; 6,878,805; 7,015,315; 7,041,816; 7,273,933; 7,321,029; and U.S. Pat. RE39464, each of which is herein incorporated by reference

[0062] Modified RNA backbones that do not include a phosphorus atom therein have backbones that are formed by short chain alkyl or cycloalkyl internucleoside linkages, mixed heteroatoms and alkyl or cycloalkyl internucleoside linkages, or one or more short chain heteroatomic or heterocyclic internucleoside linkages. These include those having morpholino linkages (formed in part from the sugar portion of a nucleoside); siloxane backbones; sulfide, sulfoxide and sulfone backbones; formacetyl and thioformacetyl backbones; methylene formacetyl and thioformacetyl backbones; alkene containing backbones; sulfamate backbones; methyleneimino and methylenehydrazino backbones; sulfonate and sulfonamide backbones; amide backbones; and others having mixed N, O, S and CH₂ component parts. Representative U.S. patents that teach the preparation of the above oligonucleosides include, but are not limited to, U.S. Pat. Nos. 5,034,506; 5,166,315; 5,185,444; 5,214,134; 5,216,141; 5,235,033; 5,64,562; 5,264,564; 5,405,938; 5,434,257; 5,466,677; 5,470,967; 5,489,677; 5,541,307; 5,561,225; 5,596,086; 5,602,240; 5,608,046; 5,610,289; 5,618,704; 5,623,070; 5,663,312; 5,633,360; 5,677,437; and, 5,677,439, each of which is herein incorporated by reference.

[0063] In other RNA mimetics suitable or contemplated for use in iRNAs, both the sugar and the internucleoside linkage, i.e., the backbone, of the nucleotide units are replaced with novel groups. The base units are maintained for hybridization with an appropriate nucleic acid target compound. One such oligomeric compound, an RNA mimetic that has been shown to have excellent hybridization properties, is referred to as a peptide nucleic acid (PNA). In PNA compounds, the sugar backbone of an RNA is replaced with an amide containing backbone, in particular an aminoethylglycine backbone. The nucleobases are retained and are bound directly or indirectly to aza nitrogen atoms of the amide portion of the backbone. Representative U.S. patents that teach the preparation of PNA compounds include, but are not limited to, U.S. Pat. Nos. 5,539,082; 5,714,331; and 5,719,262, each of which is herein incorporated by reference. Further teaching of PNA compounds can be found, for example, in Nielsen et al., Science, 1991, 254, 1497-1500.

[0064] Some embodiments include RNAs with phosphorothioate backbones and oligonucleosides with heteroatom backbones, and in particular —CH₂—NH—CH₂—, —CH₂—N(CH₃)—O—CH₂-[known as a methylene (methylimino) or MMI backbone], —CH₂—O—N(CH₃)—CH₂—, —CH₂—N(CH₃)—N(CH₃)—CH₂— and —N(CH₃)—CH₂—CH₂-[wherein the native phosphodiester backbone is represented as —O—P—O—CH₂—] of the above-referenced U.S. Pat. No. 5,489,677, and the amide backbones of the above-referenced U.S. Pat. No. 5,602,240. In some embodiments, the RNAs featured herein have morpholino backbone structures of the above-referenced U.S. Pat. No. 5,034,506.

[0065] Modified RNAs can also contain one or more substituted sugar moieties. The iRNAs, e.g., dsRNAs, featured herein can include one of the following at the 2′ position: OH; F; O-, S-, or N-alkyl; O-, S-, or N-alkenyl; O-, S- or N-alkynyl; or O-alkyl-O-alkyl, wherein the alkyl, alkenyl and alkynyl may be substituted or unsubstituted C₁ to C₁₀ alkyl or C₂ to C₁₀ alkenyl and alkynyl. Exemplary suitable modifications include O[(CH₂)ₙO]ₘCH₃, O(CH₂).ₙOCH₃, O(CH₂)ₙNH₂, O(CH₂)ₙCH₃, O(CH₂)ₙONH₂, and O(CH₂)ₙON[(CH₂)ₙCH₃)]₂, where n and m are from 1 to about 10. In other embodiments, dsRNAs include one of the following at the 2′ position: C₁ to C₁₀ lower alkyl, substituted lower alkyl, alkaryl, aralkyl, O-alkaryl or O-aralkyl, SH, SCH₃, OCN, Cl, Br, CN, CF₃, OCF₃, SOCH₃, SO₂CH₃, ONO₂, NO₂, N₃, NH₂, heterocycloalkyl, heterocycloalkaryl, aminoalkylamino, polyalkylamino, substituted silyl, an RNA cleaving group, a reporter group, an intercalator, a group for improving the pharmacokinetic properties of an iRNA, or a group for improving the pharmacodynamic properties of an iRNA, and other substituents having similar properties. In some embodiments, the modification includes a 2′-methoxyethoxy (2′-O—CH₂CH₂OCH₃, also known as 2′-O-(2-methoxyethyl) or 2′-MOE) (Martin et al., Helv. Chim. Acta, 1995, 78:486-504) i.e., an alkoxy-alkoxy group. Another exemplary modification is 2′-dimethylaminooxyethoxy, i.e., a O(CH₂)₂ON(CH₃)₂ group, also known as 2′-DMAOE, as described in examples herein below, and 2′-dimethylaminoethoxyethoxy (also known in the art as 2′-O-dimethylaminoethoxyethyl or 2′-DMAEOE), i.e., 2′-O—CH₂—O—CH₂—N(CH₂)₂, also described in examples herein below.

[0066] Other modifications include 2′-methoxy (2′-OCH₃), 2′-aminopropoxy (2′-OCH₂CH₂CH₂NH₂) and 2′-fluoro (2′-F). Similar modifications can also be made at other positions on the RNA of an iRNA, particularly the 3′ position of the sugar on the 3′ terminal nucleotide or in 2′-5′ linked dsRNAs and the 5′ position of 5′ terminal nucleotide. iRNAs may also have sugar mimetics such as cyclobutyl moieties in place of the pentofuranosyl sugar. Representative U.S. patents that teach the preparation of such modified sugar structures include, but are not limited to, U.S. Pat. Nos. 4,981,957; 5,118,800; 5,319,080; 5,359,044; 5,393,878; 5,446,137; 5,466,786; 5,514,785; 5,519,134; 5,567,811; 5,576,427; 5,591,722; 5,597,909; 5,610,300; 5,627,053; 5,639,873; 5,646,265; 5,658,873; 5,670,633; and 5,700,920, certain of which are commonly owned with the instant application, and each of which is herein incorporated by reference.

[0067] An iRNA can also include nucleobase (often referred to in the art simply as “base”) modifications or substitutions. As used herein, “unmodified” or “natural” nucleobases include the purine bases adenine (A) and guanine (G), and the pyrimidine bases thymine (T), cytosine (C) and uracil (U). Modified nucleobases include other synthetic and natural nucleobases such as 5-methylcytosine (5-me-C), 5-hydroxymethyl cytosine, xanthine, hypoxanthine, 2-aminoadenine, 6-methyl and other alkyl derivatives of adenine and guanine, 2-propyl and other alkyl derivatives of adenine and guanine, 2-thiouracil, 2-thiothymine and 2-thiocytosine, 5-halouracil and cytosine, 5-propynyl uracil and cytosine, 6-azo uracil, cytosine and thymine, 5-uracil (pseudouracil), 4-thiouracil, 8-halo, 8-amino, 8-thiol, 8-thioalkyl, 8-hydroxyl anal other 8-substituted adenines and guanines, 5-halo, particularly 5-bromo, 5-trifluoromethyl and other 5-substituted uracils and cytosines, 7-methylguanine and 7-methyladenine, 8-azaguanine and 8-azaadenine, 7-deazaguanine and 7-daazaadenine and 3-deazaguanine and 3-deazaadenine. Further nucleobases include those disclosed in U.S. Pat. No. 3,687,808, those disclosed in Modified Nucleosides in Biochemistry, Biotechnology and Medicine, Herdewijn, P. ed. Wiley-VCH, 2008; those disclosed in The Concise Encyclopedia Of Polymer Science And Engineering, pages 858-859, Kroschwitz, J. L, ed. John Wiley & Sons, 1990, these disclosed by Englisch et al., Angewandte Chemie, International Edition, 1991, 30, 613, and those disclosed by Sanghvi, Y S., Chapter 15, dsRNA Research and Applications, pages 289-302, Crooke, S. T. and Lebleu, B., Ed., CRC Press, 1993. Certain of these nucleobases are particularly useful for increasing the binding affinity of the oligomeric compounds featured in the invention. These include 5-substituted pyrimidines, 6-azapyrimidines and N-2, N-6 and 0-6 substituted purines, including 2-aminopropyladenine, 5-propynyluracil and 5-propynylcytosine. 5-methylcytosine substitutions have been shown to increase nucleic acid duplex stability by 0.6-1.2° C. (Sanghvi, Y. S., Crooke, S. T. and Lebleu, B., Eds., dsRNA Research and Applications, CRC Press, Boca Raton, 1993, pp. 276-278) and are exemplary base substitutions, even more particularly when combined with 2′-O-methoxyethyl sugar modifications.

[0068] Representative U.S. patents that teach the preparation of certain of the above noted modified nucleobases as well as other modified nucleobases include, but are not limited to, the above noted U.S. Pat. No. 3,687,808, as well as U.S. Pat. Nos. 4,845,205; 5,130,30; 5,134,066; 5,175,273; 5,367,066; 5,432,272; 5,457,187; 5,459,255; 5,484,908; 5,502,177; 5,525,711; 5,552,540; 5,587,469; 5,594,121, 5,596,091; 5,614,617; 5,681,941; 6,015,886; 6,147,200; 6,166,197; 6,222,025; 6,235,887; 6,380,368; 6,528,640; 6,639,062; 6,617,438; 7,045,610; 7,427,672; and 7,495,088, each of which is herein incorporated by reference, and U.S. Pat. No. 5,750,692, also herein incorporated by reference.

[0069] The RNA of an iRNA can also be modified to include one or more locked nucleic acids (LNA). A locked nucleic acid is a nucleotide having a modified ribose moiety in which the ribose moiety comprises an extra bridge connecting the 2′ and 4′ carbons. This structure effectively “locks” the ribose in the 3′-endo structural conformation. The addition of locked nucleic acids to siRNAs has been shown to increase siRNA stability in serum, and to reduce off-target effects (Elmen, J. et al., (2005) Nucleic Acids Research 33(1):439-447; Mook, O R. et al., (2007) Mol Canc Ther 6(3):833-843; Grunweller, A. et al., (2003) Nucleic Acids Research 31(12):3185-3193). Representative U.S. patents that teach the preparation of locked nucleic acid nucleotides include, but are not limited to, the following: U.S. Pat. Nos. 6,268,490; 6,670,461; 6,794,499; 6,998,484; 7,053,207; 7,084,125; and 7,399,845, each of which is herein incorporated by reference in its entirety.

[0070] Another modification of the RNA of an iRNA as described herein involves chemically linking to the RNA one or more ligands, moieties or conjugates that enhance the activity, cellular distribution, pharmacokinetic properties, or cellular uptake of the iRNA. Such moieties include but are not limited to lipid moieties such as a cholesterol moiety (Letsinger et al., Proc. Natl. Acid. Sci. USA, 1989, 86: 6553-6556), cholic acid (Manoharan et al., Biorg. Med. Chem. Let., 1994, 4:1053-1060), a thioether, e.g., beryl-S-tritylthiol (Manoharan et al., Ann. N.Y. Acad. Sci., 1992, 660:306-309; Manoharan et al., Biorg. Med. Chem. Let., 1993, 3:2765-2770), a thiocholesterol (Oberhauser et al., Nucl. Acids Res., 1992, 20:533-538), an aliphatic chain, e.g., dodecandiol or undecyl residues (Saison-Behmoaras et al., EMBO J, 1991, 10:1111-1118; Kabanov et al., FEBS Lett., 1990, 259:327-330; Svinarchuk et al., Biochimie, 1993, 75:49-54), a phospholipid, e.g., di-hexadecyl-rac-glycerol or triethyl-ammonium 1,2-di-O-hexadecyl-rac-glycero-3-phosphonate (Manoharan et al., Tetrahedron Lett., 1995, 36:3651-3654; Shea et al., Nucl. Acids Res., 1990, 18:3777-3783), a polyamine or a polyethylene glycol chain (Manoharan et al., Nucleosides & Nucleotides, 1995, 14:969-973), or adamantane acetic acid (Manoharan et al., Tetrahedron Lett., 1995, 36:3651-3654), a palmityl moiety (Mishra et al., Biochim. Biophys. Acta, 1995, 1264:229-237), or an octadecylamine or hexylamino-carbonyloxycholesterol moiety (Crooke et al., J. Pharmacol. Exp. Ther., 1996, 277:923-937).

[0071] In some embodiments, an inhibitor of a gene expression product of a gene of Table 1 can be an antibody reagent specific for the respective polypeptide. For example, in some embodiments, a BRCA2 inhibitor can be an anti-BRCA2 antibody reagent. Antibodies have, historically, been viewed as unable to cross the plasma membrane. However, antibodies have been demonstrated to gain access to intracellular protein targets (see, e.g. Guo et al., Science Translational Med. 2011 3:99ra85; WO2008/136774; Guo et al. Cancer Biol and Ther 2008 7:752-9; and Ferrone. Sci Transl Med 2011 3:99ps38) both in cultured cells and in vivo.

[0072] As used herein an “antibody” refers to IgG, IgM, IgA, IgD or IgE molecules or antigen-specific antibody fragments thereof (including, but not limited to, a Fab, F(ab′)₂, Fv, disulphide linked Fv, scFv, single domain antibody, closed conformation multispecific antibody, disulphide-linked scfv, diabody), whether derived from any species that naturally produces an antibody, or created by recombinant DNA technology; whether isolated from serum, B-cells, hybridomas, transfectomas, yeast or bacteria.

[0073] As described herein, an “antigen” is a molecule that is bound by a binding site on an antibody agent. Typically, antigens are bound by antibody ligands and are capable of raising an antibody response in vivo. An antigen can be a polypeptide, protein, nucleic acid or other molecule or portion thereof. The term “antigenic determinant” refers to an epitope on the antigen recognized by an antigen-binding molecule, and more particularly, by the antigen-binding site of said molecule.

[0074] As used herein, the term “antibody reagent” refers to a polypeptide that includes at least one immunoglobulin variable domain or immunoglobulin variable domain sequence and which specifically binds a given antigen. An antibody reagent can comprise an antibody or a polypeptide comprising an antigen-binding domain of an antibody. In some embodiments, an antibody reagent can comprise a monoclonal antibody or a polypeptide comprising an antigen-binding domain of a monoclonal antibody. For example, an antibody can include a heavy (H) chain variable region (abbreviated herein as VH), and a light (L) chain variable region (abbreviated herein as VL). In another example, an antibody includes two heavy (H) chain variable regions and two light (L) chain variable regions. The term “antibody reagent” encompasses antigen-binding fragments of antibodies (e.g., single chain antibodies, Fab and sFab fragments, F(ab′)2, Fd fragments, Fv fragments, scFv, CDRs, and domain antibody (dAb) fragments (see, e.g. de Wildt et al., Eur J. Immunol. 1996; 26(3):629-39; which is incorporated by reference herein in its entirety)) as well as complete antibodies. An antibody can have the structural features of IgA, IgG, IgE, IgD, or IgM (as well as subtypes and combinations thereof). Antibodies can be from any source, including mouse, rabbit, pig, rat, and primate (human and non-human primate) and primatized antibodies. Antibodies also include midibodies, humanized antibodies, chimeric antibodies, and the like.

[0075] The VH and VL regions can be further subdivided into regions of hypervariability, termed “complementarity determining regions” (“CDR”), interspersed with regions that are more conserved, termed “framework regions” (“FR”). The extent of the framework region and CDRs has been precisely defined (see, Kabat, E. A., et al. (1991) Sequences of Proteins of Immunological Interest, Fifth Edition, U.S. Department of Health and Human Services, NIH Publication No. 91-3242, and Chothia, C. et al. (1987) J. Mol. Biol. 196:901-917; which are incorporated by reference herein in their entireties). Each VH and VL is typically composed of three CDRs and four FRs, arranged from amino-terminus to carboxy-terminus in the following order: FR1, CDR1, FR2, CDR2, FR3, CDR3, FR4.

[0076] As used herein, the term “specific binding” refers to a chemical interaction between two molecules, compounds, cells and/or particles wherein the first entity binds to the second, target entity with greater specificity and affinity than it binds to a third entity which is a non-target. In some embodiments, specific binding can refer to an affinity of the first entity for the second target entity which is at least 10 times, at least 50 times, at least 100 times, at least 500 times, at least 1000 times or greater than the affinity for the third nontarget entity.

[0077] Additionally, and as described herein, a recombinant humanized antibody can be further optimized to decrease potential immunogenicity, while maintaining functional activity, for therapy in humans. In this regard, functional activity means a polypeptide capable of displaying one or more known functional activities associated with a recombinant antibody or antibody reagent thereof as described herein. Such functional activities include, e.g. the ability to bind to the target polypeptide.

[0078] In some embodiments, an inhibitor of a gene expression product of a gene of Table 1 can be a small molecule. Small molecule inhibitors of the various targets described herein are known in the art. For example, inhibitors of RAD51 can include but are not limited to IBR2; RI-1; RI-2; and B02.

[0079] Because of the lower mutagenesis rate associated with alternative HDR, promotion of alternative HDR during gene modification (e.g. genetic engineering) can reduce the rate of unwanted mutations introduced during modification. In one aspect, provided herein is a method of gene modification, the method comprising contacting a cell with: a) a donor nucleic acid molecule comprising the gene modification to be made in the cell; b) a nickase; and c) an inhibitor of one or more genes of Table 1. In some embodiments, the inhibitor is an inhibitor of RAD51; BRCA2; PALB2 and/or SHFM1.

[0080] As used herein, “gene modification” refers to a process of introducing a desired modification into a nucleic acid sequence. In some embodiments, gene modification can be targeted gene modification, i.e. the introduction of a desired modification at a particular genetic locus. Modifications can include insertions, deletions, and/or mutations relative to the original sequence. In the aspects described herein, the modification can be comprised by a donor nucleic acid molecule and the modification can be introduced into a target nucleic acid sequence via the methods described herein.

[0081] In some embodiments, a method of gene modification can comprise introducing a detectable “tag” to an existing or endogenous gene present in the target nucleic acid. Because of the lower rates of mutagenesis caused by the methods described herein, it is particularly well suited to such modifications. Detectable tags are nucleic acid sequences which generate or comprise the ability to generate a detectable signal (e.g. by catalyzing a reaction converting a compound to a detectable product) either as a transcribed nucleic acid product or as a translated polypeptide product. Detectable tags can include, by way of non-limiting example, e.g., fluorescent polypeptides (e.g. GFP; mCherry; CFP; GFP; ZsGreen1; YFP; ZsYellow1; mBanana; mOrange; DsRed; tdTomato; DsRed2; mStrawberry; HcRed1; mRaspberry; E2-Crimson; mPlum; Dendra 2; Timer; PAmCherry; and Cerulean fluorescent protein), epitope tags (e.g. HA, FLAG, V5, VSV-G, HSV, biotin, and Myc), or TRX.

[0082] As used herein, “donor nucleic acid molecule” refers to a nucleic acid molecule which has been selected and introduced (e.g. introduced into a cell) to serve as a template for alternative HDR repair. In some embodiments, a donor nucleic acid molecule can comprise a modification to be introduced into the target cell, e.g. at a nick or break. In some embodiments, a donor nucleic acid molecule can be single-stranded or double-stranded. In some embodiments, donor nucleic acid molecule can comprise, e.g., DNA, RNA, or modified versions thereof, e.g. LNA. In some embodiments, the donor nucleic acid molecule can be ssDNA. In some embodiments, a donor nucleic acid molecule can be a nicked dsDNA.

[0083] In some embodiments, the donor nucleic acid molecule can be at least about 20 nt in length, e.g. at least about 20 nt in length, at least about 25 nt in length, at least about 30 nt in length, at least about 40 nt in length, at least about 50 nt in length, at least about 60 nt in length, at least about 70 nt in length, at least about 100 nt in length, at least about 200 nt in length, at least about 300 nt in length, at least about 400 nt in length, at least about 500 nt in length, at least about 1 kb in length, at least about 2 kb in length, at least about 3 kb in length, at least about 4 kb in length, or at least about 5 kb in length. In some embodiments, the donor nucleic acid molecule can be from about 20 nt to about 1000 nt in length. In some embodiments, the donor nucleic acid molecule can be from about 20 nt to about 500 nt in length. In some embodiments, the donor nucleic acid molecule can be from about 50 nt to about 200 nt in length.

[0084] In some embodiments, the donor nucleic acid molecule can comprise a portion complementary to the strand of the target nucleic acid molecule that is not nicked by the nickase. In some embodiments, a portion of the donor nucleic acid molecule can specifically hybridize to the strand of the target nucleic acid molecule that is not nicked by the nickase, e.g. under the conditions under which the modification process will occur. In some embodiments, the complementary portion is at least 20 nucleotides in length, e.g., 20 nt or longer, 25 nt or longer, 30 nt or longer, 40 nt or longer, or 50 nt or longer. In some embodiments, the donor nucleic acid molecule can comprise multiple portions complementary to the strand of the target nucleic acid molecule that is not nicked by the nickase, e.g. 2 portions, 3 portions, or 4 or more portions. In some embodiments, the multiple complementary portions can flank a modification, e.g. an insertion or deletion comprised by the donor nucleic acid molecule can be flanked by portions of the nucleic acid molecule that are complementary to the strand of the target nucleic acid molecule that is not nicked by the nickase.

[0085] In some embodiments, the efficiency of gene modification can be increased if the portion of the donor nucleic acid molecule which anneals to the target nucleic acid molecule is centered around the location of the nick generated in the target nucleic acid molecule. In some embodiments, the portion of the donor nucleic acid molecule that is complementary to a strand of the target nucleic acid molecule is substantially centered with respect to the location of the nick. In some embodiments, a molecule can be substantially centered if no more than 70% of the molecule is located to either side of the reference point (e.g. the location of the nick), e.g. 70% or less, 65% or less, 60% or less, 55% or less, or about 50% of the molecule is located to either side of the reference point. In some embodiments, a portion of a molecule can be substantially centered if no more than 70% of the portion of the molecule is located to either side of the reference point (e.g. the location of the nick), e.g. 70% or less, 65% or less, 60% or less, 55% or less, or about 50% of the portion of the molecule is located to either side of the reference point.

[0086] As used herein, “nuclease” refers to an enzyme capable of cleaving the phosphodiester bonds between the nucleotide subunits of nucleic acids. Nucleases can be site-specific, i.e. site-specific nucleases cleave DNA bonds only after specifically binding to a particular sequence. Therefore, nucleases specific for a given target can be readily selected by one of skill in the art. Nucleases often cleave both strands of dsDNA molecule within several bases of each other, resulting in a double-stranded break. Non-limiting examples of nucleases can include nucleases comprising a FokI cleavage domain, zinc finger nucleases, TALE nucleases, RNA-guided engineered nucleases, Cas9, Cas9-derived nucleases, homing endonucleases (e.g. I-AniI, I-CreI, and I-SceI) and the like. Further discussion of the various types of nucleases and how their site-specificity can be engineered can be found, e.g. in Silva et al. Curr Gene Ther 2011 11:11-27; Gaj et al. Trends in Biotechnology 2013 31:397-405; Humbert et al. Critical Reviews in Biochemistry and Molecular Biology 2012 47:264-281; and Kim and Kim Nature 2014 doi:10.1038/nrg3686; each of which is incorporated by reference herein in its entirety.

[0087] As used herein, “nickase” refers to a nuclease which cleaves only one strand of a dsDNA molecule, thereby generating a nick. Non-limiting examples of nickases can include a nuclease with one active site disabled; I-AniI with one active site disabled; or Cas9^{D10A}. Further discussion of nickases can be found, e.g. in Chan and Xu. NEB Expressions 2006 vol 1.2; Ramierez et al., Nucleic Acids Research 2012 40:5560-8; and Kim et al. Genome Research 2012 22:1327-1333; each of which is incorporated by reference herein in its entirety.

[0088] It is noted that nucleases and nickases can be readily engineered to target any given sequence. For example, Cas9-derived nucleases and nickases are targeted by means of guide nucleic acid molecules, which can be engineered to hybridize specifically to a desired target nucleic acid molecule. By way of further non-limiting example, zinc finger nucleases can be targeted by a combinatorial assembly of multiple zinc finger domains with known DNA triplet specificities. Such targeting approaches are known in the art and described, e.g. in Silva et al. Curr Gene Ther 2011 11:11-27; Ran et al. Cell 2013 154:1380-9; Jinek et al. Science 2013 337:816-821; Carlson et al. PNAS 212 109:17382-7, Guerts et al. Science 2009 325:433-3; Takasu et al. Insect Biochem Mol Biol 2010 40:759-765; and Watanabe et al. Nat. Commun. 2012 3; each of which is incorporated by reference herein in its entirety.

[0089] In some embodiments, the method can further comprise generating a nick in the nucleic acid molecule to be modified. In some embodiments, the method can further comprise generating a nick in the transcribed strand of the nucleic acid molecule to be modified. In some embodiments, the nick in the transcribed strand is generated by contacting the nucleic acid to be modified with a nickase specific for the transcribed strand of a dsDNA. As used herein, “transcribed strand” refers to the strand of a dsDNA which serves as the template for transcription. The transcribed strand may also be referred to herein by as the “template strand.” In a transcribable nucleic acid molecule of known sequence, one of skill in the art can readily distinguish a transcribed strand from its complement and/or by analyzing gene expression product sequences. A “transcribed strand” of a nucleic acid molecule to be modified and a donor nucleic acid molecule serving as a “template” for alternative HDR may share homology and/or complementarity but are not necessarily related and should not be conflated.

[0090] In one aspect, provided herein is a method of gene modification, the method comprising contacting the cell with a) a ssDNA donor nucleic acid molecule comprising the gene modification to be made in the cell; b) a nuclease; and c) an inhibitor of a gene expression product of a gene of Table 1. In some embodiments, the inhibitor can be an inhibitor of RAD51; BRCA2; PALB2 or SHFM1. In embodiments where the donor nucleic acid molecule is a single-stranded nucleic acid, the donor nucleic acid molecule comprises a portion complementary to one strand of the target nucleic acid molecule. In some embodiments, the nuclease can be a nickase. In some embodiments, the donor nucleic acid molecule can comprise a portion complementary to the strand of the target nucleic acid molecule that is not nicked by the nickase. In some embodiments, a portion of the donor nucleic acid molecule can specifically hybridize to the strand of the target nucleic acid molecule that is not nicked by the nickase, e.g. under the conditions under which the modification process will occur.

[0091] In some embodiments, the modification can be introduced as a gene therapy, e.g., to repair a mutation or defect in the DNA of a cell and/or subject. Such repairs can restore wild type and/or normal function of a gene and/or reduce harmful effects of a gene.

[0092] In some embodiments, the methods of gene modification can be performed in vivo. Alternatively, in some embodiments, the methods of gene modification can further comprise the step of implanting the modified cell in a subject. In some embodiments, the cell can be autologous to the subject. In some embodiments, the cell can be a stem cell, e.g. a somatic stem cell, a fetal stem cell, and/or an iPSC.

[0093] In some embodiments of the aspects described herein, the modification can correct a mutation. In some embodiments, a harmful or deleterious mutation is corrected, e.g. to the wildtype sequence and/or to a benign sequence. In some embodiments, modification can introduce a mutation. In some embodiments, a mutation can provide improved function. In some embodiments, a modification introduced according to the methods described herein can cause improved cell function. As used herein, “improved cell function” refers to an increase in at least one desirable activity that increases the productivity and/or survival of the cell or contributes positively to the health of an organism comprising the cell. In some embodiments, improved cell function can include a beneficial function the cell did not previously demonstrate or the loss of a deleterious function the cell did previously demonstrate. By way of non-limiting example, improved function can be accomplished by, e.g., modifying a viral gene or a gene comprising a dominant negative mutation. For example, a latent viral gene (e.g. HIV) can be modified (e.g. knocked-out or disabled). Another non-limiting example relates to collagen A mutations, which are often dominant negative. By specifically targeting a modification to the defective allele that prevented synthesis of proteins, collagen would become functional in the cell (e.g. a corrective modification and/or a modification which knocks out or knocks down the dominant negative allele).

[0094] In some embodiments of the foregoing aspects, the rate of mutatgenic end joining is not increased as a result of the method. In some embodiments of the foregoing aspects, the rate of mutatgenic end joining is not altered as a result of the method, e.g. it is neither increased nor decreased by a statistically significant amount. As used herein “mutagenic end-joining” refers to any DSB repair pathway that directly ligates the ends of DSB without the use of a homologous template, and results in at least one mutation arising relative to the original sequence. Mutagenic end joining can include, e.g., non-homologous end joining (NHEJ) and microhomology-mediated end joining (MMEJ).

[0095] Conversely, increasing the activity of the genes of Table 1 can decrease the rate of alternative HDR. Because of the mechanism of HDR, damaged DNA may be repaired using the second chromosome of a pair as the donor nucleic acid molecule. Such repair mechanisms can lead to a loss of heterozygosity, a leading cause of genomic instability in cancer. Accordingly, in order to prevent a loss of heterozygosity and decrease genomic instability, described herein is a method of decreasing genomic instability in a cell, the method comprising contacting the cell with an agonist of a gene of Table 1 or an inhibitor of BRCA1. In some embodiments, the agonist can be an agonist of RAD51; BRCA2; PALB2 or SHFM1. In some embodiments, the cell can be a cancerous cell.

[0096] As used herein, the term “BRCA1” refers to a gene encoding a polypeptide with a zinc finger domain and a BRCT domain, which is involved in DNA damage repair. BRCA1 binds to DNA and interacts directly with RAD51. Sequences for BRCA1 polypeptides and nucleic acids for a number of species are known in the art, e.g. human SHFM1 (NCBI Gene ID: 672) polypeptide (SEQ ID NO: 172; NCBI Ref Seq: NP_{—}009225) and nucleic acid (SEQ ID NO: 173; NCBI Ref Seq: NM_{—}007294).

[0097] As used herein, “agonist” refers to any agent that increases the level and/or activity of the target, e.g, of BRCA2. As used herein, the term “agonist” refers to an agent which increases the expression and/or activity of the target by at least 10% or more, e.g. by 10% or more, 50% or more, 100% or more, 200% or more, 500% or more, or 1000% or more. Non-limiting examples of agonists of BRCA2 can include BRCA2 polypeptides or fragments thereof and nucleic acids encoding a BRCA2 polypeptide, e.g. a polypeptide comprising the sequence SEQ ID NO: 095 or a nucleic acid comprising the sequence of SEQ ID NO: 009 or variants thereof. Fragments of BRCA2 which retain BRCA2 activity are known in the art, e.g. either the PALB2-interaction domain or the DNA-binding domain can be deleted and the resulting polypeptide retains activity. The structure of BRCA2, and fragments thereof that retain activity are described in more detail in, e.g. Siaud et al. PLoS Genetics 2011 7:e1002409; which is incorporated by reference herein in its entirety.

[0098] In some embodiments, an agonist can be a nucleic acid encoding the target, e.g. a nucleic aid encoding RAD51; BRCA2; PALB2 or SHFM1. As used herein, the term “nucleic acid” or “nucleic acid sequence” refers to any molecule, preferably a polymeric molecule, incorporating units of ribonucleic acid, deoxyribonucleic acid or an analog thereof. The nucleic acid can be either single-stranded or double-stranded. A single-stranded nucleic acid can be one strand nucleic acid of a denatured double-stranded DNA. Alternatively, it can be a single-stranded nucleic acid not derived from any double-stranded DNA. In one aspect, the template nucleic acid is DNA. In another aspect, the template is RNA. DNA can include genomic DNA or cDNA. Other suitable nucleic acid molecules include RNA, including mRNA. The nucleic acid molecule can be naturally occurring, as in genomic DNA, or it may be synthetic, i.e., prepared based up human action, or may be a combination of the two. The nucleic acid molecule can also have certain modification such as 2′-deoxy, 2′-deoxy-2′-fluoro, 2′-O-methyl, 2′-O-methoxyethyl (2′-O-MOE), 2′-O-aminopropyl (2′-O-AP), 2′-O-dimethylaminoethyl (2′-O-DMAOE), 2′-O-dimethylaminopropyl (2′-O-DMAP), 2′-O-dimethylaminoethyloxyethyl (2′-O-DMAEOE), or 2′-O—N-methylacetamido (2′-O-NMA), cholesterol addition, and phosphorothioate backbone as described in US Patent Application 20070213292; and certain ribonucleoside that are is linked between the 2′-oxygen and the 4′-carbon atoms with a methylene unit as described in U.S. Pat. No. 6,268,490, wherein both patent and patent application are incorporated hereby reference in their entirety.

[0099] In some embodiments, a nucleic acid encoding a polypeptide as described herein (e.g. an BRCA2 polypeptide) can be comprised by a vector. In some of the aspects described herein, a nucleic acid sequence encoding a given polypeptide as described herein, or any module thereof, is operably linked to a vector. The term “vector”, as used herein, refers to a recombinant nucleic acid construct designed for delivery to a host cell or for transfer between different host cells. As used herein, a vector can be viral or non-viral. The term “vector” encompasses any genetic element that is capable of replication when associated with the proper control elements and that can transfer gene sequences to cells. A vector can include, but is not limited to, a cloning vector, an expression vector, a plasmid, phage, transposon, cosmid, chromosome, virus, virion, etc.

[0100] As used herein, the term “expression vector” refers to a vector that directs expression of an RNA or polypeptide from sequences linked to transcriptional regulatory sequences on the vector. The sequences expressed will often, but not necessarily, be heterologous to the cell. An expression vector may comprise additional elements, for example, the expression vector may have two replication systems, thus allowing it to be maintained in two organisms, for example in human cells for expression and in a prokaryotic host for cloning and amplification. The term “expression” refers to the cellular processes involved in producing RNA and proteins and as appropriate, secreting proteins, including where applicable, but not limited to, for example, transcription, transcript processing, translation and protein folding, modification and processing. “Expression products” include RNA transcribed from a gene, and polypeptides obtained by translation of mRNA transcribed from a gene. The term “gene” means the nucleic acid sequence which is transcribed (DNA) to RNA in vitro or in vivo when operably linked to appropriate regulatory sequences. The gene may or may not include regions preceding and following the coding region, e.g. 5′ untranslated (5′UTR) or “leader” sequences and 3′ UTR or “trailer” sequences, as well as intervening sequences (introns) between individual coding segments (exons).

[0101] As used herein, the term “viral vector” refers to a nucleic acid vector construct that includes at least one element of viral origin and has the capacity to be packaged into a viral vector particle. The viral vector can contain the nucleic acid encoding a gene expression product as described herein in place of non-essential viral genes. The vector and/or particle may be utilized for the purpose of transferring nucleic acids into cells either in vitro or in vivo. Numerous forms of viral vectors are known in the art.

[0102] By “recombinant vector” is meant a vector that includes a heterologous nucleic acid sequence, or “transgene” that is capable of expression in vivo. It should be understood that the vectors described herein can, in some embodiments, be combined with other suitable compositions and therapies. In some embodiments, the vector is episomal. The use of a suitable episomal vector provides a means of maintaining the nucleotide of interest in the subject in high copy number extra chromosomal DNA thereby eliminating potential effects of chromosomal integration.

[0103] As used herein, “genomic instability” refers to the loss and/or alteration of genetic material. In some embodiments, genomic instability can be a loss of heterozygosity.

[0104] In some embodiments, the contacting step can comprise administering the agonist or inhibitor to a subject in need of treatment for a risk of genomic instability. In some embodiments, the subject can be a subject having or diagnosed as having cancer.

[0105] In some embodiments, the methods described herein relate to treating a subject having or diagnosed as having cancer with a composition as described herein, e.g. an agonist of a gene selected from Table 1 and/or an inhibitor of BRCA1. Subjects having cancer can be identified by a physician using current methods of diagnosing cancer. As used herein, the term “cancer” or “tumor” refers to an uncontrolled growth of cells which interferes with the normal functioning of the bodily organs and systems. A subject who has a cancer or a tumor is a subject having objectively measurable cancer cells present in the subject's body. Included in this definition are benign and malignant cancers, as well as dormant tumors or micrometastases. Cancers which migrate from their original location and seed vital organs can eventually lead to the death of the subject through the functional deterioration of the affected organs.

[0106] The compositions and methods described herein can be administered to a subject having or diagnosed as having cancer. In some embodiments, the methods described herein comprise administering an effective amount of compositions described herein to a subject in order to alleviate a symptom of a cancer. As used herein, “alleviating a symptom of a cancer” is ameliorating any condition or symptom associated with the cancer. As compared with an equivalent untreated control, such reduction is by at least 5%, 10%, 20%, 40%, 50%, 60%, 80%, 90%, 95%, 99% or more as measured by any standard technique. A variety of means for administering the compositions described herein to subjects are known to those of skill in the art. Such methods can include, but are not limited to oral, parenteral, intravenous, intramuscular, subcutaneous, transdermal, airway (aerosol), pulmonary, cutaneous, topical, injection, or intratumoral administration. Administration can be local or systemic.

[0107] The term “effective amount” as used herein refers to the amount of a therapy needed to alleviate at least one or more symptom of the disease or disorder, and relates to a sufficient amount of pharmacological composition to provide the desired effect. The term “therapeutically effective amount” therefore refers to an amount of a therapy that is sufficient to provide a particular therapeutic effect when administered to a typical subject. An effective amount as used herein, in various contexts, would also include an amount sufficient to delay the development of a symptom of the disease, alter the course of a symptom disease (for example but not limited to, slowing the progression of a symptom of the disease), or reverse a symptom of the disease. Thus, it is not generally practicable to specify an exact “effective amount”. However, for any given case, an appropriate “effective amount” can be determined by one of ordinary skill in the art using only routine experimentation.

[0108] Effective amounts, toxicity, and therapeutic efficacy can be determined by standard pharmaceutical procedures in cell cultures or experimental animals, e.g., for determining the LD50 (the dose lethal to 50% of the population) and the ED50 (the dose therapeutically effective in 50% of the population). The dosage can vary depending upon the dosage form employed and the route of administration utilized. The dose ratio between toxic and therapeutic effects is the therapeutic index and can be expressed as the ratio LD50/ED50. Compositions and methods that exhibit large therapeutic indices are preferred. A therapeutically effective dose can be estimated initially from cell culture assays. Also, a dose can be formulated in animal models to achieve a circulating plasma concentration range that includes the IC50 (i.e., the concentration of a CTC marker-gene targeted therapy, which achieves a half-maximal inhibition of symptoms) as determined in cell culture, or in an appropriate animal model. Levels in plasma can be measured, for example, by high performance liquid chromatography. The effects of any particular dosage can be monitored by a suitable bioassay, e.g., tumor growth, among others. The dosage can be determined by a physician and adjusted, as necessary, to suit observed effects of the treatment.

[0109] In some embodiments, the technology described herein relates to a pharmaceutical composition comprising a composition (e.g. an agonist of a gene selected from Table 1 or an inhibitor of BRCA1) as described herein, and optionally a pharmaceutically acceptable carrier. Pharmaceutically acceptable carriers and diluents include saline, aqueous buffer solutions, solvents and/or dispersion media. The use of such carriers and diluents is well known in the art. Some non-limiting examples of materials which can serve as pharmaceutically-acceptable carriers include: (1) sugars, such as lactose, glucose and sucrose; (2) starches, such as corn starch and potato starch; (3) cellulose, and its derivatives, such as sodium carboxymethyl cellulose, methylcellulose, ethyl cellulose, microcrystalline cellulose and cellulose acetate; (4) powdered tragacanth; (5) malt; (6) gelatin; (7) lubricating agents, such as magnesium stearate, sodium lauryl sulfate and talc; (8) excipients, such as cocoa butter and suppository waxes; (9) oils, such as peanut oil, cottonseed oil, safflower oil, sesame oil, olive oil, corn oil and soybean oil; (10) glycols, such as propylene glycol; (11) polyols, such as glycerin, sorbitol, mannitol and polyethylene glycol (PEG); (12) esters, such as ethyl oleate and ethyl laurate; (13) agar; (14) buffering agents, such as magnesium hydroxide and aluminum hydroxide; (15) alginic acid; (16) pyrogen-free water; (17) isotonic saline; (18) Ringer's solution; (19) ethyl alcohol; (20) pH buffered solutions; (21) polyesters, polycarbonates and/or polyanhydrides; (22) bulking agents, such as polypeptides and amino acids (23) serum component, such as serum albumin, HDL and LDL; (22) C₂-C₁₂ alcohols, such as ethanol; and (23) other non-toxic compatible substances employed in pharmaceutical formulations. Wetting agents, coloring agents, release agents, coating agents, sweetening agents, flavoring agents, perfuming agents, preservative and antioxidants can also be present in the formulation. The terms such as “excipient”, “carrier”, “pharmaceutically acceptable carrier” or the like are used interchangeably herein. In some embodiments, the carrier inhibits the degradation of the active agent.

[0110] In some embodiments, the pharmaceutical composition as described herein can be a parenteral dose form. Since administration of parenteral dosage forms typically bypasses the patient's natural defenses against contaminants, parenteral dosage forms are preferably sterile or capable of being sterilized prior to administration to a patient. Examples of parenteral dosage forms include, but are not limited to, solutions ready for injection, dry products ready to be dissolved or suspended in a pharmaceutically acceptable vehicle for injection, suspensions ready for injection, and emulsions. In addition, controlled-release parenteral dosage forms can be prepared for administration of a patient, including, but not limited to, DUROS®-type dosage forms and dose-dumping.

[0111] Suitable vehicles that can be used to provide parenteral dosage forms of a composition as described herein are well known to those skilled in the art. Examples include, without limitation: sterile water; water for injection USP; saline solution; glucose solution; aqueous vehicles such as but not limited to, sodium chloride injection, Ringer's injection, dextrose Injection, dextrose and sodium chloride injection, and lactated Ringer's injection; water-miscible vehicles such as, but not limited to, ethyl alcohol, polyethylene glycol, and propylene glycol; and non-aqueous vehicles such as, but not limited to, corn oil, cottonseed oil, peanut oil, sesame oil, ethyl oleate, isopropyl myristate, and benzyl benzoate. Compounds that alter or modify the solubility of a pharmaceutically acceptable salt of a composition as disclosed herein can also be incorporated into the parenteral dosage forms of the disclosure, including conventional and controlled-release parenteral dosage forms.

[0112] Pharmaceutical compositions comprising a composition described herein can also be formulated to be suitable for oral administration, for example as discrete dosage forms, such as, but not limited to, tablets (including without limitation scored or coated tablets), pills, caplets, capsules, chewable tablets, powder packets, cachets, troches, wafers, aerosol sprays, or liquids, such as but not limited to, syrups, elixirs, solutions or suspensions in an aqueous liquid, a non-aqueous liquid, an oil-in-water emulsion, or a water-in-oil emulsion. Such compositions contain a predetermined amount of the pharmaceutically acceptable salt of the disclosed compounds, and may be prepared by methods of pharmacy well known to those skilled in the art. See generally, Remington: The Science and Practice of Pharmacy, 21st Ed., Lippincott, Williams, and Wilkins, Philadelphia Pa. (2005).

[0113] Conventional dosage forms generally provide rapid or immediate drug release from the formulation. Depending on the pharmacology and pharmacokinetics of the drug, use of conventional dosage forms can lead to wide fluctuations in the concentrations of the drug in a patient's blood and other tissues. These fluctuations can impact a number of parameters, such as dose frequency, onset of action, duration of efficacy, maintenance of therapeutic blood levels, toxicity, side effects, and the like. Advantageously, controlled-release formulations can be used to control a drug's onset of action, duration of action, plasma levels within the therapeutic window, and peak blood levels. In particular, controlled- or extended-release dosage forms or formulations can be used to ensure that the maximum effectiveness of a drug is achieved while minimizing potential adverse effects and safety concerns, which can occur both from under-dosing a drug (i.e., going below the minimum therapeutic levels) as well as exceeding the toxicity level for the drug. In some embodiments, the therapy can be administered in a sustained release formulation. Controlled-release pharmaceutical products have a common goal of improving drug therapy over that achieved by their non-controlled release counterparts. Ideally, the use of an optimally designed controlled-release preparation in medical treatment is characterized by a minimum of drug substance being employed to cure or control the condition in a minimum amount of time. Advantages of controlled-release formulations include: 1) extended activity of the drug; 2) reduced dosage frequency; 3) increased patient compliance; 4) usage of less total drug; 5) reduction in local or systemic side effects; 6) minimization of drug accumulation; 7) reduction in blood level fluctuations; 8) improvement in efficacy of treatment; 9) reduction of potentiation or loss of drug activity; and 10) improvement in speed of control of diseases or conditions. Kim, Cherng-ju, Controlled Release Dosage Form Design, 2 (Technomic Publishing, Lancaster, Pa.: 2000).

[0114] Most controlled-release formulations are designed to initially release an amount of drug (active ingredient) that promptly produces the desired therapeutic effect, and gradually and continually release other amounts of drug to maintain this level of therapeutic or prophylactic effect over an extended period of time. In order to maintain this constant level of drug in the body, the drug must be released from the dosage form at a rate that will replace the amount of drug being metabolized and excreted from the body. Controlled-release of an active ingredient can be stimulated by various conditions including, but not limited to, pH, ionic strength, osmotic pressure, temperature, enzymes, water, and other physiological conditions or compounds.

[0115] A variety of known controlled- or extended-release dosage forms, formulations, and devices can be adapted for use with the salts and compositions of the disclosure. Examples include, but are not limited to, those described in U.S. Pat. Nos. 3,845,770; 3,916,899; 3,536,809; 3,598,123; 4,008,719; 5,674,533; 5,059,595; 5,591,767; 5,120,548; 5,073,543; 5,639,476; 5,354,556; 5,733,566; and 6,365,185 B1; each of which is incorporated herein by reference. These dosage forms can be used to provide slow or controlled-release of one or more active ingredients using, for example, hydroxypropylmethyl cellulose, other polymer matrices, gels, permeable membranes, osmotic systems (such as OROS® (Alza Corporation, Mountain View, Calif. USA)), or a combination thereof to provide the desired release profile in varying proportions.

[0116] The methods described herein can further comprise administering a second agent and/or treatment to the subject, e.g. as part of a combinatorial therapy. Non-limiting examples of a second agent and/or treatment can include radiation therapy, surgery, and chemotherapeutic agents.

[0117] In certain embodiments, an effective dose of a composition as described herein can be administered to a patient once. In certain embodiments, an effective dose of a composition comprising a composition described herein can be administered to a patient repeatedly. For systemic administration, subjects can be administered a therapeutic amount of a composition, such as, e.g. 10 μg/kg, 10 μg/kg, 0.1 mg/kg, 0.5 mg/kg, 1.0 mg/kg, 2.0 mg/kg, 2.5 mg/kg, 5 mg/kg, 10 mg/kg, 15 mg/kg, 20 mg/kg, 25 mg/kg, 30 mg/kg, 40 mg/kg, 50 mg/kg, or more.

[0118] In some embodiments, after an initial treatment regimen, the treatments can be administered on a less frequent basis. For example, after treatment biweekly for three months, treatment can be repeated once per month, for six months or a year or longer. Treatment according to the methods described herein can reduce levels of a marker or symptom of a condition, e.g. tumor growth by at least 10%, at least 15%, at least 20%, at least 25%, at least 30%, at least 40%, at least 50%, at least 60%, at least 70%, at least 80% or at least 90% or more.

[0119] The dosage of a composition as described herein can be determined by a physician and adjusted, as necessary, to suit observed effects of the treatment. With respect to duration and frequency of treatment, it is typical for skilled clinicians to monitor subjects in order to determine when the treatment is providing therapeutic benefit, and to determine whether to increase or decrease dosage, increase or decrease administration frequency, discontinue treatment, resume treatment, or make other alterations to the treatment regimen. The dosing schedule can vary from once a week to daily depending on a number of clinical factors, such as the subject's sensitivity to the therapy. The desired dose or amount of activation can be administered at one time or divided into subdoses, e.g., 2-4 subdoses and administered over a period of time, e.g., at appropriate intervals through the day or other appropriate schedule. In some embodiments, administration can be chronic, e.g., one or more doses and/or treatments daily over a period of weeks or months. Examples of dosing and/or treatment schedules are administration daily, twice daily, three times daily or four or more times daily over a period of 1 week, 2 weeks, 3 weeks, 4 weeks, 1 month, 2 months, 3 months, 4 months, 5 months, or 6 months, or more. A composition can be administered over a period of time, such as over a 5 minute, 10 minute, 15 minute, 20 minute, or 25 minute period.

[0120] The efficacy of a therapy in, e.g. the treatment of a condition described herein, or to induce a response as described herein (e.g. reduction of tumor growth) can be determined by the skilled clinician. However, a treatment is considered “effective treatment,” as the term is used herein, if one or more of the signs or symptoms of a condition described herein are altered in a beneficial manner, other clinically accepted symptoms are improved, or even ameliorated, or a desired response is induced e.g., by at least 10% following treatment according to the methods described herein. Efficacy can be assessed, for example, by measuring a marker, indicator, symptom, and/or the incidence of a condition treated according to the methods described herein or any other measurable parameter appropriate, e.g. tumor size and/or growth. Efficacy can also be measured by a failure of an individual to worsen as assessed by hospitalization, or need for medical interventions (i.e., progression of the disease is halted). Methods of measuring these indicators are known to those of skill in the art and/or are described herein. Treatment includes any treatment of a disease in an individual or an animal (some non-limiting examples include a human or an animal) and includes: (1) inhibiting the disease, e.g., preventing a worsening of symptoms (e.g. pain or inflammation); or (2) relieving the severity of the disease, e.g., causing regression of symptoms. An effective amount for the treatment of a disease means that amount which, when administered to a subject in need thereof, is sufficient to result in effective treatment as that term is defined herein, for that disease. Efficacy of an agent can be determined by assessing physical indicators of a condition or desired response. It is well within the ability of one skilled in the art to monitor efficacy of administration and/or treatment by measuring any one of such parameters, or any combination of parameters. Efficacy can be assessed in animal models of a condition described herein, for example treatment of cancer, e.g. pancreatic cancer. When using an experimental animal model, efficacy of treatment is evidenced when a statistically significant change in a marker is observed, e.g. a change in the rate of tumor growth, genomic instability, LOH, or the rate of alternative HDR.

[0121] In one aspect, described herein is a kit comprising a nuclease or a nickase; and an inhibitor of a gene expression product of a gene of Table 1. In some embodiments, the inhibitor can be an inhibitor of RAD51; BRCA2; PALB2 or SHFM1. In some embodiments, the kit can further comprise a donor nucleic acid molecule. In some embodiments, nickase can be selected from the group consisting of: a nuclease with one active site disabled; I-AniI with one active site disabled; or Cas9^{D10A}. In some embodiments, the inhibitor can be an inhibitory nucleic acid. In some embodiments, the inhibitor can be an antibody reagent. In some embodiments, the inhibitor can be selected from the group consisting of: IBR2; RI-1; RI-2; and B02.

[0122] A kit is any manufacture (e.g., a package or container) comprising a nickase or nuclease as described herein and an inhibitor of a gene expression product of a gene of Table 1, according to the various embodiments herein, the manufacture being promoted, distributed, or sold as a unit for performing a methods as described herein. The kits described herein can optionally comprise additional components useful for performing the methods and assays described herein. Such reagents can include, e.g. a donor nucleic acid, transfection or vial packaging reagents, cell culture media, buffer solutions, labels, and the like. Such ingredients are known to the person skilled in the art and may vary depending on the particular cells and methods or assay to be carried out. Additionally, the kit may comprise an instruction leaflet and/or may provide information as to the relevance of the obtained results.

[0123] For convenience, the meaning of some terms and phrases used in the specification, examples, and appended claims, are provided below. Unless stated otherwise, or implicit from context, the following terms and phrases include the meanings provided below. The definitions are provided to aid in describing particular embodiments, and are not intended to limit the claimed invention, because the scope of the invention is limited only by the claims. Unless otherwise defined, all technical and scientific terms used herein have the same meaning as commonly understood by one of ordinary skill in the art to which this invention belongs. If there is an apparent discrepancy between the usage of a term in the art and its definition provided herein, the definition provided within the specification shall prevail.

[0124] For convenience, certain terms employed herein, in the specification, examples and appended claims are collected here.

[0125] The terms “decrease”, “reduced”, “reduction”, or “inhibit” are all used herein to mean a decrease by a statistically significant amount. In some embodiments, “reduce,” “reduction” or “decrease” or “inhibit” typically means a decrease by at least 10% as compared to a reference level (e.g. the absence of a given treatment) and can include, for example, a decrease by at least about 10%, at least about 20%, at least about 25%, at least about 30%, at least about 35%, at least about 40%, at least about 45%, at least about 50%, at least about 55%, at least about 60%, at least about 65%, at least about 70%, at least about 75%, at least about 80%, at least about 85%, at least about 90%, at least about 95%, at least about 98%, at least about 99%, or more. As used herein, “reduction” or “inhibition” does not encompass a complete inhibition or reduction as compared to a reference level. “Complete inhibition” is a 100% inhibition as compared to a reference level. A decrease can be preferably down to a level accepted as within the range of normal for an individual without a given disorder.

[0126] The terms “increased”, “increase”, “enhance”, or “activate” are all used herein to mean an increase by a statically significant amount. In some embodiments, the terms “increased”, “increase”, “enhance”, or “activate” can mean an increase of at least 10% as compared to a reference level, for example an increase of at least about 20%, or at least about 30%, or at least about 40%, or at least about 50%, or at least about 60%, or at least about 70%, or at least about 80%, or at least about 90% or up to and including a 100% increase or any increase between 10-100% as compared to a reference level, or at least about a 2-fold, or at least about a 3-fold, or at least about a 4-fold, or at least about a 5-fold or at least about a 10-fold increase, or any increase between 2-fold and 10-fold or greater as compared to a reference level. In the context of a marker or symptom, an “increase” is a statistically significant increase in such level.

[0127] As used herein, a “subject” means a human or animal. Usually the animal is a vertebrate such as a primate, rodent, domestic animal or game animal. Primates include chimpanzees, cynomologous monkeys, spider monkeys, and macaques, e.g., Rhesus. Rodents include mice, rats, woodchucks, ferrets, rabbits and hamsters. Domestic and game animals include cows, horses, pigs, deer, bison, buffalo, feline species, e.g., domestic cat, canine species, e.g., dog, fox, wolf, avian species, e.g., chicken, emu, ostrich, and fish, e.g., trout, catfish and salmon. In some embodiments, the subject is a mammal, e.g., a primate, e.g., a human. The terms, “individual,” “patient” and “subject” are used interchangeably herein.

[0128] Preferably, the subject is a mammal. The mammal can be a human, non-human primate, mouse, rat, dog, cat, horse, or cow, but is not limited to these examples. Mammals other than humans can be advantageously used as subjects that represent animal models of, e.g. cancer or a condition in need of gene therapy. A subject can be male or female.

[0129] As used herein, the term “complementary” refers to the hierarchy of hydrogen-bonded base pair formation preferences between the nucleotide bases G, A, T, C and U, such that when two given polynucleotides or polynucleotide sequences anneal to each other, A pairs with T and G pairs with C in DNA, and G pairs with C and A pairs with U in RNA. As used herein, “substantially complementary” refers to a nucleic acid molecule or portion thereof having at least 90% complementarity over the entire length of the molecule or portion thereof with a second nucleotide sequence, e.g. 90% complementary, 95% complementary, 98% complementary, 99% complementary, or 100% complementary. As used herein, “substantially identical” refers to a nucleic acid molecule or portion thereof having at least 90% identity over the entire length of a the molecule or portion thereof with a second nucleotide sequence, e.g. 90% identity, 95% identity, 98% identity, 99% identity, or 100% identity.

[0130] As used herein, “specific” when used in the context of a sequence specific for a target nucleic acid refers to a level of complementarity between the donor nucleic acid molecule and the target such that there exists an annealing temperature at which the donor nucleic acid molecule will anneal to and mediate repair of the target nucleic acid and will not anneal to or mediate repair of non-target sequences present in a sample.

[0131] As used herein, a “portion” of a nucleic acid molecule refers to contiguous set of nucleotides comprised by that molecule. A portion can comprise any subset less than all nucleotides comprised by the reference nucleic acid molecule. A portion can be double-stranded or single-stranded.

[0132] The term “agent” refers generally to any entity which is normally not present or not present at the levels being administered to a cell, tissue or subject and which mediates or causes a desired effect within the context of a method as described herein. An agent can be selected from a group including but not limited to: polynucleotides; polypeptides; small molecules; and antibodies or antigen-binding fragments thereof. A polynucleotide can be RNA or DNA, and can be single or double stranded, and can be selected from a group including, for example, nucleic acids and nucleic acid analogues that encode a polypeptide. A polypeptide can be, but is not limited to, a naturally-occurring polypeptide, a mutated polypeptide or a fragment thereof that retains the function of interest. Further examples of agents include, but are not limited to a nucleic acid aptamer, peptide-nucleic acid (PNA), locked nucleic acid (LNA), small organic or inorganic molecules; saccharide; oligosaccharides; polysaccharides; biological macromolecules, peptidomimetics; nucleic acid analogs and derivatives; extracts made from biological materials such as bacteria, plants, fungi, or mammalian cells or tissues and naturally occurring or synthetic compositions. An agent can be applied to the media, where it contacts the cell and induces its effects. Alternatively, an agent can be intracellular as a result of introduction of a nucleic acid sequence encoding the agent into the cell and its transcription resulting in the production of the nucleic acid and/or protein within the cell. In some embodiments, the agent is any chemical, entity or moiety, including without limitation synthetic and naturally-occurring non-proteinaceous entities that mediate or cause a desired effect within the context of a method as described herein. In certain embodiments the agent is a small molecule having a chemical moiety selected, for example, from unsubstituted or substituted alkyl, aromatic, or heterocyclyl moieties including macrolides, leptomycins and related natural products or analogues thereof. Agents can be known to have a desired activity and/or property, or can be selected, on the basis of activity, from a library of diverse compounds. As used herein, the term “small molecule” can refer to compounds that are “natural product-like,” however, the term “small molecule” is not limited to “natural product-like” compounds. Rather, a small molecule is typically characterized in that it contains several carbon-carbon bonds, and has a molecular weight more than about 50, but less than about 5000 Daltons (5 kD). Preferably the small molecule has a molecular weight of less than 3 kD, still more preferably less than 2 kD, and most preferably less than 1 kD. In some cases it is preferred that a small molecule have a molecular mass equal to or less than 700 Daltons.

[0133] A subject can be one who has been previously diagnosed with or identified as suffering from or having a condition in need of treatment (e.g. cancer or a condition in need of gene therapy) or one or more complications related to such a condition, and optionally, have already undergone treatment for the condition or the one or more complications related to the condition. Alternatively, a subject can also be one who has not been previously diagnosed as having a condition or one or more complications related to the condition. For example, a subject can be one who exhibits one or more risk factors for cancer or a condition in need of gene therapy or one or more complications related to cancer or a condition in need of gene therapy or a subject who does not exhibit risk factors.

[0134] A “subject in need” of treatment for a particular condition can be a subject having that condition, diagnosed as having that condition, or at risk of developing that condition.

[0135] As used herein, the terms “protein” and “polypeptide” are used interchangeably herein to designate a series of amino acid residues, connected to each other by peptide bonds between the alpha-amino and carboxy groups of adjacent residues. The terms “protein”, and “polypeptide” refer to a polymer of amino acids, including modified amino acids (e.g., phosphorylated, glycated, glycosylated, etc.) and amino acid analogs, regardless of its size or function. “Protein” and “polypeptide” are often used in reference to relatively large polypeptides, whereas the term “peptide” is often used in reference to small polypeptides, but usage of these terms in the art overlaps. The terms “protein” and “polypeptide” are used interchangeably herein when referring to a gene product and fragments thereof. Thus, exemplary polypeptides or proteins include gene products, naturally occurring proteins, homologs, orthologs, paralogs, fragments and other equivalents, variants, fragments, and analogs of the foregoing.

[0136] As used herein, a given “polypeptide”, e.g. a BRCA2 polypeptide, can include the human polypeptide as well as homologs from other species, including but not limited to bovine, dog, cat chicken, murine, rat, porcine, ovine, turkey, horse, fish, baboon and other primates. The terms also refer to fragments or variants of the wild-type polypeptide that maintain at least 50% of the activity or effect, of the full length wild-type polypeptide. Conservative substitution variants that maintain the activity of wildtype polypeptides will include a conservative substitution as defined herein. The identification of amino acids most likely to be tolerant of conservative substitution while maintaining at least 50% of the activity of the wildtype is guided by, for example, sequence alignment with homologs or paralogs from other species. Amino acids that are identical between homologs are less likely to tolerate change, while those showing conservative differences are obviously much more likely to tolerate conservative change in the context of an artificial variant. Similarly, positions with non-conservative differences are less likely to be critical to function and more likely to tolerate conservative substitution in an artificial variant. Variants, fragments, and/or fusion proteins can be tested for activity, for example, by administering the variant to an appropriate animal model of allograft rejection as described herein.

[0137] In some embodiments, a polypeptide, e.g., a BRCA2 polypeptide, can be a variant of a sequence described herein. In some embodiments, the variant is a conservative substitution variant. Variants can be obtained by mutations of native nucleotide sequences, for example. A “variant,” as referred to herein, is a polypeptide substantially homologous to a native or reference polypeptide, but which has an amino acid sequence different from that of the native or reference polypeptide because of one or a plurality of deletions, insertions or substitutions. Polypeptide-encoding DNA sequences encompass sequences that comprise one or more additions, deletions, or substitutions of nucleotides when compared to a native or reference DNA sequence, but that encode a variant protein or fragment thereof that retains the relevant biological activity relative to the reference protein. As to amino acid sequences, one of skill will recognize that individual substitutions, deletions or additions to a nucleic acid, peptide, polypeptide, or protein sequence which alters a single amino acid or a small percentage, (i.e. 5% or fewer, e.g. 4% or fewer, or 3% or fewer, or 1% or fewer) of amino acids in the encoded sequence is a “conservatively modified variant” where the alteration results in the substitution of an amino acid with a chemically similar amino acid. It is contemplated that some changes can potentially improve the relevant activity, such that a variant, whether conservative or not, has more than 100% of the activity of the wildtype polypeptide, e.g. 110%, 125%, 150%, 175%, 200%, 500%, 1000% or more.

[0138] One method of identifying amino acid residues which can be substituted is to align, for example, human polypeptide to a homolog from one or more non-human species. Alignment can provide guidance regarding not only residues likely to be necessary for function but also, conversely, those residues likely to tolerate change. Where, for example, an alignment shows two identical or similar amino acids at corresponding positions, it is more likely that that site is important functionally. Where, conversely, alignment shows residues in corresponding positions to differ significantly in size, charge, hydrophobicity, etc., it is more likely that that site can tolerate variation in a functional polypeptide. The variant amino acid or DNA sequence can be at least 90%, at least 95%, at least 96%, at least 97%, at least 98%, at least 99%, or more, identical to a native or reference sequence, or a nucleic acid encoding one of those amino acid sequences. The degree of homology (percent identity) between a native and a mutant sequence can be determined, for example, by comparing the two sequences using freely available computer programs commonly employed for this purpose on the world wide web. The variant amino acid or DNA sequence can be at least 90%, at least 91%, at least 92%, at least 93%, at least 94%, at least 95%, at least 96%, at least 97%, at least 98%, at least 99%, or more, similar to the sequence from which it is derived (referred to herein as an “original” sequence). The degree of similarity (percent similarity) between an original and a mutant sequence can be determined, for example, by using a similarity matrix. Similarity matrices are well known in the art and a number of tools for comparing two sequences using similarity matrices are freely available online, e.g. BLASTp (available on the world wide web at http://blast.ncbi.nlm.nih.gov), with default parameters set.

[0139] A given amino acid can be replaced by a residue having similar physiochemical characteristics, e.g., substituting one aliphatic residue for another (such as Ile, Val, Leu, or Ala for one another), or substitution of one polar residue for another (such as between Lys and Arg; Glu and Asp; or Gln and Asn). Other such conservative substitutions, e.g., substitutions of entire regions having similar hydrophobicity characteristics, are well known. Polypeptides comprising conservative amino acid substitutions can be tested in any one of the assays described herein to confirm that a desired activity of a native or reference polypeptide is retained. Conservative substitution tables providing functionally similar amino acids are well known in the art. Such conservatively modified variants are in addition to and do not exclude polymorphic variants, interspecies homologs, and alleles consistent with the disclosure. Typically conservative substitutions for one another include: 1) Alanine (A), Glycine (G); 2) Aspartic acid (D), Glutamic acid (E); 3) Asparagine (N), Glutamine (Q); 4) Arginine (R), Lysine (K); 5) Isoleucine (I), Leucine (L), Methionine (M), Valine (V); 6) Phenylalanine (F), Tyrosine (Y), Tryptophan (W); 7) Serine (S), Threonine (T); and 8) Cysteine (C), Methionine (M) (see, e.g., Creighton, Proteins (1984)).

[0140] Any cysteine residue not involved in maintaining the proper conformation of the polypeptide also can be substituted, generally with serine, to improve the oxidative stability of the molecule and prevent aberrant crosslinking Conversely, cysteine bond(s) can be added to the polypeptide to improve its stability or facilitate oligomerization.

[0141] In some embodiments, a polypeptide can comprise one or more amino acid substitutions or modifications. In some embodiments, the substitutions and/or modifications can prevent or reduce proteolytic degradation and/or prolong half-life of the polypeptide in the subject or cell. In some embodiments, a polypeptide can be modified by conjugating or fusing it to other polypeptide or polypeptide domains such as, by way of non-limiting example, transferrin (WO06096515A2), albumin (Yeh et al., 1992), growth hormone (US2003104578AA); cellulose (Levy and Shoseyov, 2002); and/or Fc fragments (Ashkenazi and Chamow, 1997). The references in the foregoing paragraph are incorporated by reference herein in their entireties.

[0142] In some embodiments, a polypeptide as described herein can comprise at least one peptide bond replacement. A polypeptide as described herein can comprise one type of peptide bond replacement or multiple types of peptide bond replacements, e.g. 2 types, 3 types, 4 types, 5 types, or more types of peptide bond replacements. Non-limiting examples of peptide bond replacements include urea, thiourea, carbamate, sulfonyl urea, trifluoroethylamine, ortho-(aminoalkyl)-phenylacetic acid, para-(aminoalkyl)-phenylacetic acid, meta-(aminoalkyl)-phenylacetic acid, thioamide, tetrazole, boronic ester, olefinic group, and derivatives thereof.

[0143] In some embodiments, a polypeptide as described herein can comprise naturally occurring amino acids commonly found in polypeptides and/or proteins produced by living organisms, e.g. Ala (A), Val (V), Leu (L), Ile (I), Pro (P), Phe (F), Tip (W), Met (M), Gly (G), Ser (S), Thr (T), Cys (C), Tyr (Y), Asn (N), Gln (Q), Asp (D), Glu (E), Lys (K), Arg (R), and His (H). In some embodiments, a polypeptide as described herein can comprise alternative amino acids. Non-limiting examples of alternative amino acids include, D-amino acids; beta-amino acids; homocysteine, phosphoserine, phosphothreonine, phosphotyrosine, hydroxyproline, gamma-carboxyglutamate; hippuric acid, octahydroindole-2-carboxylic acid, statine, 1,2,3,4-tetrahydroisoquinoline-3-carboxylic acid, penicillamine (3-mercapto-D-valine), ornithine, citruline, alpha-methyl-alanine, para-benzoylphenylalanine, para-amino phenylalanine, p-fluorophenylalanine, phenylglycine, propargylglycine, sarcosine, and tert-butylglycine), diaminobutyric acid, 7-hydroxy-tetrahydroisoquinoline carboxylic acid, naphthylalanine, biphenylalanine, cyclohexylalanine, amino-isobutyric acid, norvaline, norleucine, tert-leucine, tetrahydroisoquinoline carboxylic acid, pipecolic acid, phenylglycine, homophenylalanine, cyclohexylglycine, dehydroleucine, 2,2-diethylglycine, 1-amino-1-cyclopentanecarboxylic acid, 1-amino-1-cyclohexanecarboxylic acid, amino-benzoic acid, amino-naphthoic acid, gamma-aminobutyric acid, difluorophenylalanine, nipecotic acid, alpha-amino butyric acid, thienyl-alanine, t-butylglycine, trifluorovaline; hexafluoroleucine; fluorinated analogs; azide-modified amino acids; alkyne-modified amino acids; cyano-modified amino acids; and derivatives thereof.

[0144] In some embodiments, a polypeptide can be modified, e.g. by addition of a moiety to one or more of the amino acids that together comprise the peptide. In some embodiments, a polypeptide as described herein can comprise one or more moiety molecules, e.g. 1 or more moiety molecules per polypeptide, 2 or more moiety molecules per polypeptide, 5 or more moiety molecules per polypeptide, 10 or more moiety molecules per polypeptide or more moiety molecules per polypeptide. In some embodiments, a polypeptide as described herein can comprise one more types of modifications and/or moieties, e.g. 1 type of modification, 2 types of modifications, 3 types of modifications or more types of modifications. Non-limiting examples of modifications and/or moieties include PEGylation; glycosylation; HESylation; ELPylation; lipidation; acetylation; amidation; end-capping modifications; cyano groups; phosphorylation; albumin, and cyclization. In some embodiments, an end-capping modification can comprise acetylation at the N-terminus, N-terminal acylation, and N-terminal formylation. In some embodiments, an end-capping modification can comprise amidation at the C-terminus, introduction of C-terminal alcohol, aldehyde, ester, and thioester moieties. The half-life of a polypeptide can be increased by the addition of moieties, e.g. PEG, albumin, or other fusion partners (e.g. Fc fragment of an immunoglobin).

[0145] In some embodiments, a polypeptide can be a functional fragment of one of the amino acid sequences described herein. As used herein, a “functional fragment” is a fragment or segment of a polypeptide which retains at least 50%, at least 60%, at least 70%, at least 80%, at least 90% or more of the activity of the wildtype polypeptide, e.g., in any of the assays described herein. A functional fragment can comprise conservative substitutions of the sequences disclosed herein.

[0146] Alterations of the original amino acid sequence can be accomplished by any of a number of techniques known to one of skill in the art. Mutations can be introduced, for example, at particular loci by synthesizing oligonucleotides containing a mutant sequence, flanked by restriction sites permitting ligation to fragments of the native sequence. Following ligation, the resulting reconstructed sequence encodes an analog having the desired amino acid insertion, substitution, or deletion. Alternatively, oligonucleotide-directed site-specific mutagenesis procedures can be employed to provide an altered nucleotide sequence having particular codons altered according to the substitution, deletion, or insertion required. Techniques for making such alterations include those disclosed by Khudyakov et al. “Artificial DNA: Methods and Applications” CRC Press, 2002; Braman “In Vitro Mutagenesis Protocols” Springer, 2004; and Rapley “The Nucleic Acid Protocols Handbook” Springer 2000; which are herein incorporated by reference in their entireties. In some embodiments, a polypeptide as described herein can be chemically synthesized and mutations can be incorporated as part of the chemical synthesis process.

[0147] As used herein, the terms “treat,” “treatment,” “treating,” or “amelioration” refer to therapeutic treatments, wherein the object is to reverse, alleviate, ameliorate, inhibit, slow down or stop the progression or severity of a condition associated with a disease or disorder, e.g. cancer. The term “treating” includes reducing or alleviating at least one adverse effect or symptom of a condition, disease or disorder associated with a cancer or a condition in need of gene therapy. Treatment is generally “effective” if one or more symptoms or clinical markers are reduced. Alternatively, treatment is “effective” if the progression of a disease is reduced or halted. That is, “treatment” includes not just the improvement of symptoms or markers, but also a cessation of, or at least slowing of, progress or worsening of symptoms compared to what would be expected in the absence of treatment. Beneficial or desired clinical results include, but are not limited to, alleviation of one or more symptom(s), diminishment of extent of disease, stabilized (i.e., not worsening) state of disease, delay or slowing of disease progression, amelioration or palliation of the disease state, remission (whether partial or total), and/or decreased mortality, whether detectable or undetectable. The term “treatment” of a disease also includes providing relief from the symptoms or side-effects of the disease (including palliative treatment).

[0148] As used herein, the term “pharmaceutical composition” refers to an active agent in combination with a pharmaceutically acceptable carrier e.g. a carrier commonly used in the pharmaceutical industry. The phrase “pharmaceutically acceptable” is employed herein to refer to those compounds, materials, compositions, and/or dosage forms which are, within the scope of sound medical judgment, suitable for use in contact with the tissues of human beings and animals without excessive toxicity, irritation, allergic response, or other problem or complication, commensurate with a reasonable benefit/risk ratio.

[0149] As used herein, the term “administering,” refers to the placement of a compound as disclosed herein into a subject by a method or route which results in at least partial delivery of the agent at a desired site. Pharmaceutical compositions comprising the compounds disclosed herein can be administered by any appropriate route which results in an effective treatment in the subject.

[0150] The term “statistically significant” or “significantly” refers to statistical significance and generally means a two standard deviation (2SD) or greater difference.

[0151] Other than in the operating examples, or where otherwise indicated, all numbers expressing quantities of ingredients or reaction conditions used herein should be understood as modified in all instances by the term “about.” The term “about” when used in connection with percentages can mean±1%.

[0152] As used herein the term “comprising” or “comprises” is used in reference to compositions, methods, and respective component(s) thereof, that are essential to the method or composition, yet open to the inclusion of unspecified elements, whether essential or not.

[0153] The term “consisting of” refers to compositions, methods, and respective components thereof as described herein, which are exclusive of any element not recited in that description of the embodiment.

[0154] As used herein the term “consisting essentially of” refers to those elements required for a given embodiment. The term permits the presence of elements that do not materially affect the basic and novel or functional characteristic(s) of that embodiment.

[0155] The singular terms “a,” “an,” and “the” include plural referents unless context clearly indicates otherwise. Similarly, the word “or” is intended to include “and” unless the context clearly indicates otherwise. Although methods and materials similar or equivalent to those described herein can be used in the practice or testing of this disclosure, suitable methods and materials are described below. The abbreviation, “e.g.” is derived from the Latin exempli gratia, and is used herein to indicate a non-limiting example. Thus, the abbreviation “e.g.” is synonymous with the term “for example.”

[0156] Definitions of common terms in cell biology and molecular biology can be found in “The Merck Manual of Diagnosis and Therapy”, 19th Edition, published by Merck Research Laboratories, 2011 (ISBN 0-911910-19-0); Robert S. Porter et al. (eds.), The Encyclopedia of Molecular Biology, published by Blackwell Science Ltd., 1994 (ISBN 0-632-02182-9); Benjamin Lewin, Genes X, published by Jones & Bartlett Publishing, 2009 (ISBN-10: 0763766321); Kendrew et al. (eds.), Molecular Biology and Biotechnology: a Comprehensive Desk Reference, published by VCH Publishers, Inc., 1995 (ISBN 1-56081-569-8) and Current Protocols in Protein Sciences 2009, Wiley Intersciences, Coligan et al., eds.

[0157] Unless otherwise stated, the present invention was performed using standard procedures, as described, for example in Sambrook et al., Molecular Cloning: A Laboratory Manual (4 ed.), Cold Spring Harbor Laboratory Press, Cold Spring Harbor, N.Y., USA (2012); Davis et al., Basic Methods in Molecular Biology, Elsevier Science Publishing, Inc., New York, USA (1995); or Methods in Enzymology: Guide to Molecular Cloning Techniques Vol. 152, S. L. Berger and A. R. Kimmel Eds., Academic Press Inc., San Diego, USA (1987); Current Protocols in Protein Science (CPPS) (John E. Coligan, et. al., ed., John Wiley and Sons, Inc.), Current Protocols in Cell Biology (CPCB) (Juan S. Bonifacino et. al. ed., John Wiley and Sons, Inc.), and Culture of Animal Cells: A Manual of Basic Technique by R. Ian Freshney, Publisher: Wiley-Liss; 5th edition (2005), Animal Cell Culture Methods (Methods in Cell Biology, Vol. 57, Jennie P. Mather and David Barnes editors, Academic Press, 1st edition, 1998) which are all incorporated by reference herein in their entireties.

[0158] Other terms are defined herein within the description of the various aspects of the invention.

[0159] All patents and other publications; including literature references, issued patents, published patent applications, and co-pending patent applications; cited throughout this application are expressly incorporated herein by reference for the purpose of describing and disclosing, for example, the methodologies described in such publications that might be used in connection with the technology described herein. These publications are provided solely for their disclosure prior to the filing date of the present application. Nothing in this regard should be construed as an admission that the inventors are not entitled to antedate such disclosure by virtue of prior invention or for any other reason. All statements as to the date or representation as to the contents of these documents is based on the information available to the applicants and does not constitute any admission as to the correctness of the dates or contents of these documents.

[0160] The description of embodiments of the disclosure is not intended to be exhaustive or to limit the disclosure to the precise form disclosed. While specific embodiments of, and examples for, the disclosure are described herein for illustrative purposes, various equivalent modifications are possible within the scope of the disclosure, as those skilled in the relevant art will recognize. For example, while method steps or functions are presented in a given order, alternative embodiments may perform functions in a different order, or functions may be performed substantially concurrently. The teachings of the disclosure provided herein can be applied to other procedures or methods as appropriate. The various embodiments described herein can be combined to provide further embodiments. Aspects of the disclosure can be modified, if necessary, to employ the compositions, functions and concepts of the above references and application to provide yet further embodiments of the disclosure. Moreover, due to biological functional equivalency considerations, some changes can be made in protein structure without affecting the biological or chemical action in kind or amount. These and other changes can be made to the disclosure in light of the detailed description. All such modifications are intended to be included within the scope of the appended claims.

[0161] Specific elements of any of the foregoing embodiments can be combined or substituted for elements in other embodiments. Furthermore, while advantages associated with certain embodiments of the disclosure have been described in the context of these embodiments, other embodiments may also exhibit such advantages, and not all embodiments need necessarily exhibit such advantages to fall within the scope of the disclosure.

[0162] The technology described herein is further illustrated by the following examples which in no way should be construed as being further limiting.

[0163] Some embodiments of the technology described herein can be defined according to any of the following numbered paragraphs:
[0164] 1. A method of increasing alternative homology-directed repair (HDR) at a target nucleic acid nick in a cell, the method comprising contacting the cell with an inhibitor of RAD51; BRCA2; PALB2 or SHFM1.
[0165] 2. A method of modifying the sequence of a target nucleic acid molecule, the method comprising contacting the target nucleic acid molecule with
   [0166] a) a donor nucleic acid molecule comprising the modification to be made in the target nucleic acid molecule;
   [0167] b) a nickase; and
   [0168] c) an inhibitor of RAD51; BRCA2; PALB2 or SHFM1.
[0169] 3. The method of paragraph 2, wherein a cell-free system comprises the target nucleic acid molecule.
[0170] 4. The method of paragraph 2, wherein a cell comprises the target nucleic acid molecule.
[0171] 5. The method of any of paragraphs 1-4, wherein the rate of mutagenic end joining is not increased.
[0172] 6. The method of any of paragraphs 1-4, wherein the rate of mutagenic end joining is not altered.
[0173] 7. The method of any of paragraphs 1-6, wherein the method further comprises generating a nick in the transcribed strand of the target nucleic acid molecule.
[0174] 8. The method of any of paragraphs 2-7, wherein the nickase is selected from the group consisting of:
   [0175] a nuclease with one active site disabled; I-AniI with one active site disabled; or Cas9^{D10A}.
[0176] 9. The method of any of paragraphs 2-8, wherein the donor nucleic acid molecule is a ssDNA or nicked dsDNA.
[0177] 10. The method of any of paragraphs 2-9, wherein the donor nucleic acid molecule comprises a portion complementary to the strand of the target nucleic acid molecule that is not nicked by the nickase.
[0178] 11. The method of paragraph 10, wherein the portion of the donor nucleic acid molecule that is complementary to a strand of the target nucleic acid molecule is substantially centered with respect to the location of the nick.
[0179] 12. A method of modifying the sequence of a target nucleic acid molecule, the method comprising contacting the target nucleic acid molecule with
   [0180] a) a ssDNA donor nucleic acid molecule comprising the modification to be made in the target nucleic acid molecule;
   [0181] b) a nuclease; and
   [0182] c) an inhibitor of RAD51; BRCA2; PALB2 or SHFM1.
[0183] 13. The method of paragraph 12, wherein a cell-free system comprises the target nucleic acid molecule.
[0184] 14. The method of paragraph 12, wherein a cell comprises the target nucleic acid molecule.
[0185] 15. The method of any of paragraphs 12-14, wherein the rate of mutagenic end joining is not increased.
[0186] 16. The method of any of paragraphs 12-14, wherein the rate of mutagenic end joining is not altered.
[0187] 17. The method of any of paragraphs 12-16, wherein the donor nucleic acid molecule comprises a portion complementary to one strand of the target nucleic acid molecule.
[0188] 18. The method of any of paragraphs 12-17, wherein the nuclease is selected from the group consisting of:
   [0189] nucleases comprising a FokI cleavage domain; zinc finger nucleases; TALE, nucleases; RNA-guided engineered nucleases; Cas9; Cas9-derived nucleases; and horning endonucleases.
[0190] 19. The method of any of paragraphs 1-18, wherein the modification is introduced as a gene therapy.
[0191] 20. The method of any of paragraphs 1-19, wherein the inhibitor is an inhibitory nucleic acid.
[0192] 21. The method of any of paragraphs 1-19, wherein the inhibitor is an antibody reagent.
[0193] 22. The method of any of paragraphs 1-19, wherein the inhibitor is selected from the group consisting of:
   [0194] IBR2; RI-1; RI-2; and B02.
[0195] 23. The method of any of paragraphs 2-22, wherein the donor nucleic acid molecule is at least about 25 nt in length.
[0196] 24. The method of any of paragraphs 2-23, wherein the donor nucleic acid molecule is at least about 50 nt in length.
[0197] 25. The method of any of paragraphs 1-24, further comprising the step of implanting a cell comprising the modified nucleic acid molecule into a subject.
[0198] 26. The method of paragraph 25, wherein the cell is autologous to the subject.
[0199] 27. The method of any of paragraphs 1-26, wherein the cell is an iPS cell.
[0200] 28. The method of any of paragraphs 1-27, wherein the modification corrects a mutation.
[0201] 29. The method of any of paragraphs 1-27, wherein the modification introduces a mutation.
[0202] 30. The method of any of paragraphs 1-29, wherein the modification causes improved cell function.
[0203] 31. The method of paragraph 30, wherein the modification is selected from the group consisting of:
   [0204] modification of a viral gene and modification of a gene comprising a dominant negative mutation.
[0205] 32. A method of decreasing genomic instability in a cell, the method comprising contacting the cell with an agonist of RAD51; BRCA2; PALB2 or SHFM1 or an inhibitor of BRCA1.
[0206] 33. The method of paragraph 32, wherein the agonist is a nucleic acid encoding RAD51; BRCA2; PALB2 or SHFM1.
[0207] 34. The method of paragraph 32, wherein the inhibitor is an inhibitory nucleic acid.
[0208] 35. The method of paragraph 32, wherein the inhibitor is an antibody reagent.
[0209] 36. The method of any of paragraphs 32-35, wherein the cell is a cancerous cell.
[0210] 37. The method of any of paragraphs 32-36, wherein the genomic instability is a loss of heterozygosity.
[0211] 38. The method of any of paragraphs 32-37, wherein the contacting step comprises administering the agonist or inhibitor to a subject in need of treatment for a risk of genomic instability.
[0212] 39. The method of paragraph 38, wherein the subject is a subject with cancer.
[0213] 40. A kit comprising:
   [0214] a nuclease or a nickase; and
   [0215] an inhibitor of RAD51; BRCA2; PALB2 or SHFM1.
[0216] 41. The kit of paragraph 40, further comprising a donor nucleic acid molecule.
[0217] 42. The kit of paragraph 41, wherein the donor nucleic acid molecule is a single-stranded nucleic acid molecule.
[0218] 43. The kit of any of paragraphs 40-42, wherein the nickase is selected from the group consisting of:
   [0219] a nuclease with one active site disabled; I-AniI with one active site disabled; or Cas9^{D10A}.
[0220] 44. The kit of any of paragraphs 40-42, wherein the nuclease is selected from the group consisting of:
   [0221] nucleases comprising a FokI cleavage domain; zinc finger nucleases; TALE nucleases; RNA-guided engineered nucleases; Cas9; Cas9-derived nucleases; and homing endonucleases.
[0222] 45. The kit of any of paragraphs 40-44, wherein the inhibitor is an inhibitory nucleic acid.
[0223] 46. The kit of any of paragraphs 40-45, wherein the inhibitor is an antibody reagent.
[0224] 47. The kit of any of paragraphs 40-46, wherein the inhibitor is selected from the group consisting of:
   [0225] IBR2; RI-1; RI-2; and B02.
[0226] 48. The kit of any of paragraphs 40-47, further comprising a cell extract.

### EXAMPLES

### Example 1

### Homology-Directed Repair of DNA Nicks

[0227] Nicks are the most common form of DNA damage and, if unrepaired, can give rise to genomic instability. Nicks can be caused by oxidative stress or irradiation and are transient intermediates in base excision repair, nucleotide excision repair, and mismatch repair. Nicks can be repaired via the single-strand break repair pathway¹ but may also initiate homology-directed repair (HDR)²⁻⁶. It is demonstrated herein that, in human cells, HDR at DNA nicks occurs via a novel pathway that is distinct from canonical double-strand break (DSB) repair. HDR at nicks is characterized by two kinds of strand asymmetry not observed at DSBs: HDR was most efficient at a nick in the transcribed strand of a transcribed gene, and preferentially used a single-stranded DNA (ssDNA) donor complementary to the intact strand. HDR at nicks using either a ssDNA or nicked duplex DNA donor was stimulated upon downregulation of RAD51 or BRCA2. Efficiency of HDR at nicks can reach levels comparable to canonical HDR at DSBs, but associated local mutagenesis is much lower, so nick-initiated HDR can be applied to gene correction and genome engineering. The alternative HDR pathway that promotes repair at nicks can be activated in BRCA2-deficient tumors or in other contexts in which canonical HDR is compromised or impaired.

[0228] Damage to the transcribed DNA strand is preferentially detected and repaired in transcription-coupled nucleotide excision repair⁷, and transcribedstrand nicks can arrest transcriptional elongation in human cell extracts⁸. To ask if nick-initiated HDR at a transcribed gene exhibited similar strand bias, a “nickase” derivative of the I-AniI homing endonuclease, disabled at one of its two active sites so it cleaves a single DNA strand to generate a nick rather than a DSB⁵ was used. Chromosomal repair targets were derived from the TL reporter⁹. TLTP and TLTP reporters carry an I-AniI site oriented for nicking the transcribed or non-transcribed strand, respectively (FIGS. 1A and 5A-5E). HDR that replaces the I-AniI site and nonsense codons yields GFP+ cells (FIGS. 1B and 5A-5E). Populations of 293T cells bearing either the TLTP or TLNT reporter at heterogeneous integration sites were transiently transfected with dsDNA plasmid donor pCS14GFP (FIGS. 5A-5E) and a construct coexpressing I-AniI and BFP. GFP+ cells among I-AniI-expressing (BFP+) cells were quantified 3 days later. No GFP+ cells were generated following either expression of I-AniI in the absence of donor DNA (FIG. 6) or following expression of catalytically inactive I-AniI in the presence of donor (FIGS. 1C-1D). Nicks initiated HDR with a nearly 8-fold greater frequency in the TLTP than in the TLNT population, while DSBs initiated HDR at comparable frequencies in both (FIGS. 1C-1D).

[0229] It is established herein that transcription causes the strand bias in HDR at nicks using reporters in which the GFP gene is tetracycline-inducible (P-Tet; FIG. 1E). Induction of transcription increased HDR 4-fold at a transcribed strand nick, and reduced HDR 2-fold at a non-transcribed strand nick, but had no effect at a DSB (FIGS. 1F and 7). This strand bias may reflect functions of the transcription apparatus in detecting a nick, preventing its immediate religation, or promoting HDR.

[0230] ssDNA can support HDR at DSBs¹⁰. It was determined if the inherent asymmetry of a nick biases donor strand utilization, using 99 nt ssDNA donors in which a central 17 nt heterologous region supports repair of the defective target gene (FIG. 2A). In clonal derivatives of either 293T or HT1080 cells carrying the TLTP reporter, nicks were more efficiently repaired by a ssDNA donor complementary to the intact chromosomal strand, while no donor strand bias was evident at DSBs (FIG. 2B). A ssDNA donor complementary to the intact strand supported HDR more efficiently regardless of whether the initiating nick was on the transcribed or non-transcribed strand, while no donor strand bias was evident in HDR at DSBs (FIG. 2C). Thus the direction of transcription determines the efficiency of HDR but does not affect donor strand bias, which can instead depend upon interactions between the donor DNA and its target. Donor strand bias evident with exogenously-supplied synthetic oligonucleotides can extend to intracellular repair of nicks by ssDNA donors derived from strands released by helicases, strand-displacement by DNA polymerases, or nucleolytic processing of structures formed during replication or recombination.

[0231] In the canonical HDR pathway, BRCA2 assembles factors including RAD51, which promotes strand exchange¹¹. Strikingly, siRAD51 treatment of the clonal 293T-TL7TP line greatly increased the frequency of HDR at nicks by either ssDNA donor, but reduced the frequency of HDR at nicks by the dsDNA donor (FIG. 3A). siRAD51 treatment reduced the frequency of HDR at DSBs, as expected, but with much greater effect on HDR by dsDNA than ssDNA donors (FIG. 3A). Transient expression of the RAD51K133R dominant negative mutant¹² had a similar effect as siRAD51 treatment, stimulating HDR by either ssDNA donor at nicks but not DSBs, in both the 293T-TL7TP (FIG. 3B) and the HT1080-TL4TP (FIG. 8) clonal lines. Stimulation was evident at nicks in either the transcribed or non-transcribed strand (FIG. 3C) Inhibition of BRCA2, by treatment of 293T-TL7TP cells with siBRCA2, similarly stimulated HDR at nicks using a ssDNA donor, but inhibited HDR at DSBs (FIG. 3D). Thus, HDR at nicks proceeds by an alternative pathway, which is normally inhibited by the canonical RAD51/BRCA2-dependent pathway and activated upon downregulation of factors in that pathway.

[0232] Activity of the alternative HDR pathway is not restricted to nicks. Upon RAD51-inhibition, ssDNA donors supported significant HDR at DSBs (50% in the 293T-TL7TP reporter line and 100% in the HT1080-TL4TP line; FIGS. 3A, 3B, and 8). Thus the alternative pathway can also support HDR at DSBs by ssDNA donors.

[0233] Strikingly, HDR frequencies at nicks in cells in which RAD51 or BRCA2 was inhibited (FIGS. 3A-3D) were comparable to HDR frequencies at DSBs, indicating that this alternative HDR pathway can provide a useful strategy for some genome engineering applications. Damage associated with gene targeting must be minimized for these applications. While the sequence-specificity of I-AniI limits its application to genome engineering, it is useful as a model in this context, as it cuts DNA to generate 5′-phosphate and 3′-hydroxyl ends like the FokI cleavage domain¹³ of zinc finger or TALE nucleases suited for genome engineering applications. The TL reporter was used to quantify mutagenic end joining (EJ) accompanied by +2 frameshift that allows the mCherry gene to be translated (FIG. 1B). In the 293T-TL7TP line, the frequency of nick-initiated mutagenic EJ was nearly two orders of magnitude lower than that of DSB-initiated mutagenic EJ, regardless of donor (FIG. 3E). RAD51K133R expression increased the frequency of mutagenic EJ, but the frequency of nick-initiated mutagenic EJ remained lower than that of DSB-initiated mutagenic EJ (FIG. 3E). At optimum conditions for HDR (nicks: transcribed-strand nick, bottom strand donor, RAD51 inhibited; DSBs: dsDNA donor), nick-initiated events exhibited a 20-fold higher ratio of HDR to mutagenic EJ than DSB-initiated events (% GFP:% mCherry cells; FIG. 3F). Thus, nick repair by the alternative HDR pathway occurs with less associated damage than DSB repair.

[0234] It was determined if alternative HDR could use a nicked dsDNA donor¹⁴ using plasmid donors carrying an I-AniI site at the 3′-end of the defective GFP gene, on either the transcribed or non-transcribed strand (FIG. 3G). Nicked dsDNA donors were 8-fold more active than the intact donor in 293T-TL7TP cells, regardless of whether the nick was on the transcribed or non-transcribed strand; and their activity was 3-fold further increased upon inhibition of RAD51 (FIG. 3H). Nicked dsDNA is therefore an active donor for the alternative HDR pathway. These results indicate that genomic dsDNA that has been nicked in the course of replication, transcription, recombination or repair may serve as an intracellular donor for nick repair by the alternative HDR pathway.

[0235] Preferential repair by a ssDNA donor complementary to the intact strand (FIGS. 2A-2C and 3A-3H) indicated an HDR mechanism in which the region near the nick is made accessible for donor annealing by unwinding or resection at the nick. It was determined if a predominant directionality characterized nick repair, by comparing HDR frequencies at nicks repaired by ssDNA donors identical in length (75 nt) and centered on the nick or extending upstream or downstream of the nick. Nick-initiated HDR at both transcribed and non-transcribed strand nicks was significantly less efficient if the region of extended homology was 3′ of the nick, independent of donor strandedness (FIG. 4A).

[0236] The results above lead to a working model for nick repair by the alternative HDR pathway. Without wishing to be bound by theory, the region 5′ of the nick may be exposed by the activity of a 3′-5′ helicase or exonuclease (FIG. 4B, top). DNA may then anneal to the exposed region independent of RAD51 (FIG. 4B, left); a similar step occurs in DSB repair at genomic repeats mediated by the single-strand annealing pathway¹⁵⁻¹⁸. Heterology is corrected and the donor released by a helicase or strand displacement. Processing generates an intact duplex with the corrected sequence at the target site. Release of the donor would preserve its integrity, so this model may apply to gene conversion at a DNA nick, as occurs at diversifying immunoglobulin genes¹⁹. An analogous pathway could carry out repair using a ssDNA donor strand (FIG. 4B, center). Alternatively, without wishing to be bound by theory, mutagenic end-joining, may occur when replication forks collide at the processed nick to generate two one-sided DSBs (FIG. 4Bt); fork stabilization by RAD51 and BRCA2 may inhibit these events²⁰. Nonetheless, the transcriptional asymmetry and donor strand bias of HDR at nicks shows that such DSBs are not an obligatory intermediate in repair by HDR.

[0237] Nicks occur frequently, underscoring the biological significance of their repair by HDR. Strikingly, the alternative HDR pathway is not just independent of but normally repressed by the canonical HDR pathway. Alternative HDR may thus be active in disease contexts in which canonical HDR is inactive, such as breast and ovarian cancers bearing BRCA2 mutations, or regions of solid tumors in which local hypoxic conditions downregulate canonical HDR21-24. The presence of nicks in both target and donor stimulated HDR via the alternative pathway, raising the intriguing possibility that HDR between nicked homologs may contribute to loss-of-heterozygosity events that drive malignancy.

[0238] Methods

[0239] Flow cytometry data were analyzed using FlowJo™ (Tree Star, Ashland, Oreg.) flow cytometry analysis software and frequencies were transferred to Microsoft Excel™ in which statistical significance was determined by two-tailed t-test. In all experiments I-AniI was co-expressed with mTagBFP (BFP) and GFP+ and mCherry+ frequencies among BFP+ cells are shown.

### REFERENCES

[0240] 1. Caldecott, K. W. Single-strand break repair and genetic disease. Nat Rev Genet 9, 619-631 (2008).
[0241] 2. Strathern, J. N., Weinstock, K. G., Higgins, D. R. & McGill, C. B. A novel recombinator in yeast based on gene II protein from bacteriophage f1. Genetics 127, 61-73 (1991).
[0242] 3. Arcangioli, B. A site- and strand-specific DNA break confers asymmetric switching potential in fission yeast. EMBO J 17, 4503-4510 (1998).
[0243] 4. Lee, G. S., Neiditch, M. B., Salus, S. S. & Roth, D. B. RAG proteins shepherd double-strand breaks to a specific pathway, suppressing error-prone repair, but RAG nicking initiates homologous recombination. Cell 117, 171-184 (2004).
[0244] 5. McConnell Smith, A. et al. Generation of a nicking enzyme that stimulates site-specific gene conversion from the I-AniI LAGLIDADG (SEQ ID NO: 218) homing endonuclease. Proc Natl Acad Sci USA 106, 5099-5104 (2009).
[0245] 6. Davis, L. & Maizels, N. DNA nicks promote efficient and safe targeted gene correction. PLoS One 6, e23981 (2011).
[0246] 7. Hanawalt, P. C. & Spivak, G. Transcription-coupled DNA repair: two decades of progress and surprises. Nat Rev Mol Cell Biol 9, 958-970 (2008).
[0247] 8. Kathe, S. D., Shen, G. P. & Wallace, S. S. Single-stranded breaks in DNA but not oxidative DNA base damages block transcriptional elongation by RNA polymerase II in HeLa cell nuclear extracts. J Biol Chem 279, 18511-18520 (2004).
[0248] 9. Certo, M. T. et al. Tracking genome engineering outcome at individual DNA breakpoints. Nat Methods 8, 671-676 (2011).
[0249] 10. Chen, F. et al. High-frequency genome editing using ssDNA oligonucleotides with zinc-finger nucleases. Nat Methods 8, 753-755 (2011).
[0250] 11. Heyer, W. D., Ehmsen, K. T. & Liu, J. Regulation of homologous recombination in eukaryotes. Annu Rev Genet 44, 113-139 (2010).
[0251] 12. Stark, J. M. et al. ATP hydrolysis by mammalian RAD51 has a key role during homology-directed DNA repair. J Biol Chem 277, 20185-20194 (2002).
[0252] 13. Sanders, K. L., Catto, L. E., Bellamy, S. R. & Halford, S. E. Targeting individual subunits of the FokI restriction endonuclease to specific DNA strands. Nucleic Acids Res 37, 2105-2115 (2009).
[0253] 14. Goncalves, M. A., van Nierop, G. P., Holkers, M. & de Vries, A. A. Concerted nicking of donor and chromosomal acceptor DNA promotes homology-directed gene targeting in human cells. Nucleic Acids Res 40, 3443-3455 (2012).
[0254] 15. Bennardo, N., Cheng, A., Huang, N. & Stark, J. M. Alternative-NHEJ is a mechanistically distinct pathway of mammalian chromosome break repair. PLoS Genet 4, e1000110 (2008).
[0255] 16. Ira, G. & Haber, J. E. Characterization of RAD51-independent break-induced replication that acts preferentially with short homologous sequences. Mol Cell Biol 22, 6384-6392 (2002).
[0256] 17. Stark, J. M., Pierce, A. J., Oh, J., Pastink, A. & Jasin, M. Genetic steps of mammalian homologous repair with distinct mutagenic consequences. Mol Cell Biol 24, 9305-9316 (2004).
[0257] 18. Weinstock, D. M., Richardson, C. A., Elliott, B. & Jasin, M. Modeling oncogenic translocations: distinct roles for double-strand break repair pathways in translocation formation in mammalian cells. DNA Repair (Amst) 5, 1065-1074 (2006).
[0258] 19. Maizels, N. Immunoglobulin gene diversification. Annu Rev Genet 39, 23-46 (2005).
[0259] 20. Schlacher, K., Wu, H. & Jasin, M. A distinct replication fork protection pathway connects Fanconi anemia tumor suppressors to RAD51-BRCA1/2. Cancer Cell 22, 106-116 (2012).
[0260] 21. Bindra, R. S. et al. Down-regulation of Rad51 and decreased homologous recombination in hypoxic cancer cells. Mol Cell Biol 24, 8504-8518 (2004).
[0261] 22. Meng, A. X. et al. Hypoxia down-regulates DNA double strand break repair gene expression in prostate cancer cells. Radiother Oncol 76, 168-176 (2005).
[0262] 23. Bristow, R. G. & Hill, R. P. Hypoxia and metabolism. Hypoxia, DNA repair and genetic instability. Nat Rev Cancer 8, 180-192 (2008).
[0263] 24. Klein, T. J. & Glazer, P. M. The tumor microenvironment and DNA repair. Semin Radiat Oncol 20, 282-287 (2010).
[0264] 25. Smith, G. R. How homologous recombination is initiated: unexpected evidence for single-strand nicks from V(D)J site-specific recombination. Cell 117, 146-148 (2004). Supplementary Information is linked to the online version of the paper at www.nature.com/nature.

### Example 2

### Homology-Directed Repair of DNA Nicks Via Pathways Distinct from Canonical Double-Strand Break Repair

[0265] DNA nicks are the most common form of DNA damage, and if unrepaired can give rise to genomic instability. In human cells, nicks are efficiently repaired via the single-strand break repair (SSBR) pathway, but relatively little is known about the fate of nicks not processed by that pathway. Here we show that homology-directed repair (HDR) at nicks occurs via a mechanism distinct from HDR at double-strand breaks (DSBs). HDR at nicks, but not DSBs, is associated with transcription, and HDR is 8 fold more efficient at a transcribed than a non-transcribed strand nick. HDR at nicks can proceed by a pathway dependent upon RAD51 and BRCA2, similar to canonical HDR at DSBs; or by an efficient alternative pathway that uses either ssDNA or nicked dsDNA donors and that is strongly inhibited by RAD51 and BRCA2. Nicks generated by either I-AniI or the CRISPR/Cas9^{D10A} nickase are repaired by the alternative HDR pathway with little accompanying mutagenic end-joining, so this pathway may be usefully applied to genome engineering. These results indicate that alternative HDR at nicks may be stimulated in physiological contexts in which canonical RAD51/BRCA2-dependent HDR is compromised or downregulated, which occurs frequently in tumors. HDR at nicks can contribute to loss of heterozygosity, a common form of genomic instability in cancer.

[0266] Nicks are a very common form of DNA damage, but their threat to genomic integrity has been neglected as it is assumed that all nicks are repaired by simple religation. That assumption is challenged herein. Identified herein is a robust pathway for homology-directed repair that is active at DNA nicks. This alternative HDR pathway is stimulated upon downregulation of BRCA2 or RAD51, key factors in canonical HDR at double-strand breaks. Alternative HDR at targeted nicks has immediate practical applications to genome engineering. The alternative HDR pathway promotes repair of a nicked target by a nicked donor, and may thereby contribute to loss-of-heterozygosity, a common form of genomic instability in tumors.

[0267] DNA nicks (single-strand breaks) are the most common form of DNA damage. Every day tens of thousands of DNA nicks occur and are repaired in each cell (1). Nicks can be caused by oxidative stress or ionizing radiation, which generates 30 nicks for every double-strand break (DSB). Reactive oxygen species (ROS), such as superoxide, hydrogen peroxide, and hydroxyl radicals can damage a deoxyribose moiety to nick DNA directly, or modify DNA precursors (e.g. by converting guanine to 8-oxo-guanine) and thereby overload downstream repair to create a burden of nicked DNA (1-4). Nicks are also intermediates in essential DNA metabolism and repair pathways, including base excision repair (BER), nucleotide excision repair (NER), mismatch repair (MMR), rNMP removal, and regulation of superhelicity by topoisomerases.

[0268] Nicks are efficiently repaired by the single-strand break repair (SSBR) pathway, which assembles a repair complex at a nick in which XRCC1 is a critical but non-catalytic member (5-8). XRCC1 interacts with factors that clean up modified DNA ends to create a gap that is filled by POL β, or the replicative polymerases POL δ and ε. LIG3 or other ligases then reseal the DNA backbone (5-7).

[0269] Nicks can also initiate homology-directed repair (HDR) (9-12). This has drawn considerable interest as a strategy for gene therapy by targeted gene correction, because nicks cause less mutagenic end joining (mutEJ) than do DSBs (13, 14). However, the mechanism of HDR at nicks has not been defined, either in mammalian cells or in model organisms such as S. cerevisiae. In particular, it is not known if HDR at nicks proceeds via the canonical HDR pathway that has been characterized in detail at DNA double-strand breaks (DSBs), in which free single-stranded 3′ ends are exposed, allowing BRCA2 to load RAD51 thus promoting strand invasion (15).

[0270] It is demonstrated herein that, in human cells, HDR at DNA nicks, but not DSBs, is associated with transcription and occurs more efficiently at a transcribed strand nick than at a non-transcribed strand nick. HDR at nicks can occur via two pathways. One pathway primarily uses dsDNA donors and requires RAD51 and BRCA2, like canonical HDR at DSBs. The alternative pathway uses ssDNA or nicked dsDNA donors, and is inhibited by RAD51 and BRCA2, but requires BRCA1. In cells treated with siBRCA2 or siRAD51, alternative HDR efficiently processes nicks targeted by the CRISPR/Cas9^{D10A} nickase, with little accompanying mutagenic end joining (mutEJ), so this pathway is of practical utility for genome engineering by targeted gene correction. Alternative HDR at nicks can be stimulated in physiological contexts in which canonical HDR is compromised by mutation or downregulated in response to environmental conditions or drugs, and can be one source of loss-of-heterozygosity (LOH), a common form of genomic instability in tumors.

[0271] Results

[0272] HDR is More Efficient at a Transcribed Strand Nick.

[0273] Damage to the transcribed strand is preferentially detected and repaired in transcription-coupled nucleotide excision repair (16), and transcribed strand nicks can arrest transcriptional elongation in human cell extracts (17). To ask if nick-initiated HDR at a transcribed gene exhibited similar strand bias, a “nickase” derivative of the I-AniI homing endonuclease, disabled at one of its two active sites so it cleaves only one DNA strand, generating a nick rather than a DSB (12) was used. An I-Ani-I site was inserted into the TL reporter (18) in both forward and reverse orientations, to create the TLTP and TLNT reporters, which support nicking on the transcribed or non-transcribed strand, respectively (FIG. 15A-15C). In cells bearing these reporters stably integrated in the genome as HDR by a homologous donor that replaces the I-AniI site and proximal stop codons yields GFP+ cells, while mutEJ events that cause a +2 frameshift yield mCherry+ cells (FIG. 9A).

[0274] Populations of 293T cells bearing either the TLTP or TLNT reporter at heterogeneous integration sites were transiently transfected with a construct co-expressing I-AniI and the blue fluorescent protein mTagBFP (BFP), and with the dsDNA plasmid donor pCS14GFP. This donor is homologous with the TLTP and TLNT reporters over a region extending 2.47 kb upstream and 0.56 kb downstream of the I-AniI site (FIG. 15A-15C). GFP+ cells among I-AniI-expressing (BFP+) cells were quantified at 3 days post-transfection. No GFP+ cells were generated following expression either of catalytically inactive I-AniI in the presence of donor (FIGS. 9B and 16A) or of active I-AniI in the absence of donor DNA (FIGS. 16B and 23). Nicks initiated HDR with nearly 8-fold greater frequency in the TLTP than in the TLNT population. DSBs initiated HDR at comparable frequencies in both populations (FIG. 9B), indicating that I-AniI recognizes its site in the two reporters with comparable efficiency. Nicks initiated many fewer mutEJ events than did DSBs, and mutEJ frequencies were comparable in TLTP and TLNT populations (FIG. 17A). Thus, HDR at nicks exhibited a clear transcriptional strand bias: a transcribed strand nick is more efficiently repaired than a non-transcribed strand nick.

[0275] Transcription Stimulates HDR at a Transcribed Strand Nick and Inhibits HDR at a Non-Transcribed Strand Nick.

[0276] To ask if active transcription was required for the transcribed strand bias in HDR at nicks, derivatives of the TLTP and TLNT reporters were created in which a tetracycline-inducible (P-Tet) was substituted for the constitutive SFFV promoter upstream of GFP. TheseP-Tet TLTP and P-Tet TLNT reporters were stably integrated at the unique FRT site in Flp-In™ T-REx™-293 cells. Cells were cultured with (ON) or without (OFF) 1 μg/ml doxycycline, transfected with an I-AniI expression construct and the pCS14GFP plasmid dsDNA donor, and after 8-9 days of culture, doxycycline was added to the OFF cells to permit detection of HDR (GFP+) and mutEJ (mCherry+) events that had occurred in the absence of transcription. Active transcription increased the frequency of HDR at a transcribed-strand nick 2.5-fold, but reduced the frequency of HDR at a non-transcribed strand nick 4-fold (FIG. 9C). These opposing effects together accounted for the 8-fold greater frequency of HDR at a transcribed strand nick in a transcribed gene (FIG. 9B). Transcription did not affect the frequency of HDR at a DSB (FIG. 9C), consistent with other reports (19-21). Without wishing to be bound by theory, the transcription-associated strand bias of HDR at nicks may reflect unwinding ahead of the transcription apparatus that exposes the recombinogenic 3′ end of a transcribed strand nick that stimulates HDR, while occlusion of the 3′ end and exposure of the less recombinogenic 5′ end of a non-transcribed strand nick may hinder HDR (FIG. 9D). Similarly, the 2-fold reduction in mutEJ observed at DSBs, but not at nicks (FIG. 17B), may be caused by occlusion of the DSB by factors associated with the transcription apparatus.

[0277] HDR at Nicks with ssDNA Donors Displays Donor Strand Bias.

[0278] ssDNA molecules can serve as donors for HDR at DSBs (22-24). It was asked if they can also serve as donors for HDR at nicks using 99 nt ssDNA oligonucleotides in which a central 17 nt heterologous region corrects the mutations in the defective target gene (FIG. 10A). HDR at transcribed-strand nicks and DSBs was assayed in clonal derivatives of either 293T or HT1080 cells carrying the TLTP reporter (FIG. 10B). ssDNA donors complementary to either the intact (cI) or nicked (cN) DNA strand supported HDR, but the donor complementary to the intact, non-transcribed, strand was several-fold more efficient. No donor strand bias was evident at DSBs.

[0279] To learn what determines ssDNA donor strand bias, HDR by ssDNA donors complementary to the intact (cI) or nicked (cN) strand at transcribed and non-transcribed strand nicks in the TLTP and TLNT populations was compared. The TLTP and TLNT populations carry reporters delivered by lentiviruses and integrated at heterogeneous chromosomal positions, to minimize possible effects of replication direction on this assay. The ssDNA donor complementary to the intact strand supported HDR more efficiently regardless of whether the initiating nick was on the transcribed or non-transcribed strand, while no donor strand bias was evident in HDR at DSBs (FIG. 10C). These results show that donor strand bias is determined by whether the donor can anneal to the nicked or intact strand, and not by transcriptional orientation.

[0280] HDR at Nicks can Proceed Via an Alternative Pathway Normally Suppressed by RAD51 and BRCA2.

[0281] RAD51 promotes strand exchange and is a critical component of the canonical HDR pathway (15). The effect of RAD51 knockdown was examined by siRNA treatment of the clonal 293T-TL7TP line. Strikingly, siRAD51 greatly increased the frequency of HDR at nicks by ssDNA donors complementary to either strand, but not by a dsDNA donor (FIG. 11A). At DSBs, siRAD51 reduced the frequency of HDR, as expected, but had a much greater effect on HDR by a dsDNA than a ssDNA donor (FIG. 11A). Similar results were observed upon transient expression of RAD51K133R, a dominant negative mutant which does not hydrolyze ATP (25), in both the 293T-TL7TP and the HT1080-TL4TP clonal lines (FIGS. 18A and 18B). RAD51K133R expression had comparable effects in assays of TLTP and TLNT populations (FIG. 11B). It was noted that siRAD51 treatment (FIG. 11A) or RAD51K133R expression (FIGS. 18A-18B) reduced HDR at a DSB by a dsDNA donor more than 10-fold, but reduced HDR at a DSB by ssDNA donors 2-fold or less.

[0282] Single-strand annealing (SSA) in human cells repairs DSBs by joining flanking repeated sequences in cis, leading to deletion (23, 26-29). SSA is inhibited by RAD51 and by BRCA2, but requires BRCA1, prompting us to assay the effects of siBRCA2 and siBRCA1 on HDR at nicks. HDR at nicks using a ssDNA donor was stimulated 60-fold by siBRCA2 in 293T-TL7TP cells (FIG. 11C, left). siBRCA1 alone caused very modest stimulation (2.5-fold); but the stimulation of HDR observed in response to treatment with either siRAD51 or siBRCA2 was reduced 4-fold by siBRCA1 (FIG. 11C, left). At DSBs, either siBRCA1, siBRCA2 or siRAD51 inhibited HDR, as expected (FIG. 11C, right). This data indicated that HDR at nicks can proceed by an alternative pathway that is normally inhibited by the canonical RAD51/BRCA2-dependent HDR pathway, but requires BRCA1. Alternative HDR shares these features with the SSA pathway despite repairing different lesions (nicks vs. DSBs) and using distinct donors (ssDNA donors in trans vs. repetitive sequences in cis).

[0283] Nicked dsDNA Donors Promote Efficient Alternative HDR Pathway.

[0284] Concerted nicking of both donor and target DNA can stimulate HDR (30). To further define how the alternative HDR pathway depends on donor structure, HDR by intact or nicked dsDNA plasmid donors of a target nicked on the transcribed strand was compared. The donors carried a GFP gene that had been inactivated by insertion of two stop codons, and no I-AniI site (pG-no) or an I-AniI site at the 3′-end of GFP on either the transcribed (pGAn-TP) or non-transcribed (pGAn-NT) DNA strand to enable intracellular nicking in cells expressing I-AniI nickase (FIG. 11D, left and FIGS. 15A-15C). The nicked donors were more active than the intact donor, regardless of which donor strand was nicked, not only in cells carrying out canonical HDR but also in cells in which canonical HDR was suppressed by transient expression of RAD51K133R (FIG. 11D, right). Thus, genomic dsDNA that has been nicked in the course of replication, transcription, recombination or repair can serve as an intracellular donor for both canonical and alternative HDR at a nick in a homologous sequence.

[0285] Efficient Alternative HDR at Nicks Generated by CRISPR/Cas9D10A.

[0286] The very high efficiency of alternative HDR at nicks suggested that this pathway might be useful in targeted gene correction. The CRISPR/Cas9 system is ideal for this application because target specificity is easily modified, and, as with I-AniI, targeting by the nickase derivative CRISPR/Cas9D10A is accompanied by less local deletion than targeting by the CRISPR/Cas9 cleavase (31). To ask if nicks generated by CRISPR/Cas9D10A could be repaired by alternative HDR, Cas9D10A or Cas9WT was co-expressed with a CRISPR guide RNA designed to target the enzyme to a site 9 bp upstream of the I-AniI recognition sequence in the TLTP reporter (FIG. 12A) in 293T-TL7TP cells in which key canonical HDR factors were transiently inhibited by siRNA treatment, and HDR assayed (FIG. 12B). HDR with a dsDNA donor at either a nick or DSB was inhibited by siBRCA2; while HDR at a nick using a ssDNA donor was stimulated by siBRCA2. The ssDNA donor complementary to the intact strand (cI) supported HDR at levels 30-fold higher than the donor complementary to the nicked strand (cN). The effect of siBRCA2 treatment and the strand bias of the ssDNA repair donor were the same at nicks targeted by CRISPR/Cas9D10A and the I-AniI nickase.

[0287] The frequency of mutEJ (mCherry+ cells) at nicks generated by CRISPR/Cas9D10A was elevated by siBRCA2 treatment, but nonetheless significantly lower than the frequency of mutEJ at a DSB generated by CRISPR/Cas9WT (FIG. 12C). Moreover, the ratio of HDR:mutEJ at nicks by the alternative HDR pathway, assayed in siBRCA2-treated cells, was 5-fold higher than at DSBs by canonical HDR (FIG. 12D). Similar results were obtained in parallel assays of mutEJ initiated by I-AniI nickase in cells in which the alternative HDR pathway was stimulated by expression of dominant negative RAD51K133R (FIG. 17C). These data indicate that the key features of HDR at a nick via the alternative pathway are characteristic of the pathway and independent of the enzyme that targets the nick. It should therefore be straightforward to achieve very efficient gene targeting accompanied by low mutEJ in cells treated transiently with siBRCA2 to stimulate alternative HDR.

[0288] 3′-5′ Unwinding or Resection of the Target May Promote HDR at a Nick.

[0289] Donor DNA strands complementary to either the nicked or intact target strand are competent to engage the alternative HDR pathway (FIGS. 10A-10C and 11A-11D), suggesting an HDR mechanism in which unwinding or resection occurs at the nick to make both strands of the chromosomal target accessible for donor annealing. To determine whether there is a predominant directionality to unwinding or resection, a comparison was made of HDR at nicks by ssDNA donors identical in length (75 nt) and centered on the nick or extending either 3′ or 5′ of the nick. The donor centered on the nick was most efficient, but donors extending in either the 3′ or 5′ direction could support HDR, in both the TLTP and TLNT populations, with donors complementary to either the intact (cI) or nicked (cN) strand (FIG. 13). This indicates that HDR pathway involves unwinding or resection that exposes a gap on either side of the nick. However, HDR was least efficient if the region of extended homology was 3′ of the nick, suggesting that the predominant initial step may be unwinding or excision 5′ of the nick, by a helicase or a nuclease with 3′-5′ directionality. Without wishing to be bound by theory, the cN oligo works and also has this property of preferring 5′ extension, and it is thereof contemplated that the predominant 3′-5′ event is unwinding as resection/excision would remove homology for this donor.

[0290] Discussion

[0291] It is demonstrated herein that nicks that bypass the SSBR pathway may undergo HDR via two distinct pathways. One pathway requires RAD51 and BRCA2 and uses a dsDNA donor, like canonical DSB repair. The second, a novel alternative pathway, uses ssDNA or nicked dsDNA donors and is normally suppressed by RAD51 and BRCA2. Both canonical and alternative HDR were most efficient at a nick in the transcribed strand of a transcribed gene. HDR at nicks by the alternative pathway could be initiated by either I-AniI or CRISPR/Cas9D10A nickase. Alternative HDR at nicks is not only efficient but also accompanied by relatively little associated mutEJ, so it will be useful for genome engineering.

[0292] The data presented herein establish that HDR at nicks is distinct from HDR at DSBs in three ways. HDR at nicks—but not DSBs—is (1) transcription-associated; (2) preferentially uses a ssDNA donor complementary to the intact strand of the target; and (3) can proceed by an alternative HDR pathway that is stimulated by downregulation of RAD51 or BRCA2 expression or activity. Previous experiments had provided compelling evidence that a nick can initiate HDR (9-13), but left open the possibility that it might be necessary for a nick to be converted to a DSB for subsequent processing by the DSB repair pathway. The differences documented herein between HDR at nicks and DSBs make it very unlikely that a replicative DSB is an obligatory intermediate in HDR initiated by a nick.

[0293] Without wishing to be bound by theory, the results reported here lead to the proposal of a working model for HDR at a nick (FIG. 14). In the first step, the flanking region is exposed to generate a gap. The apparent preference for a ssDNA donor with extended homology 3′ (rather than 5′) of the nick (FIG. 13) suggests that a helicase with 3′-5′ directionality may act at the nick to generate a free 3′ end. In HDR using a dsDNA donor (left), BRCA2 loads RAD51 on the free 3′ end to promote homology-dependent strand invasion, as in canonical DSB repair. This 3′ end is extended by repair DNA synthesis, again as in canonical DSB repair. The donor strand is then released and reanneals to the repair target, and flaps are removed and DNA ligated. This resembles gene conversion by synthesis-dependent strand annealing (15), but recombination might also involve crossover via a single Holiday junction intermediate (32, 33).

[0294] Use of a ssDNA donor occurs via an alternative HDR pathway, which is independent of RAD51/BRCA2 (FIG. 14, right). First, DNA unwinding or excision at the nick exposes a gap in the repair target; and then ssDNA anneals to the target. This step is not only independent of BRCA2 and RAD51 but strongly inhibited by these factors (FIGS. 11A-11D and 12A-12D).

[0295] Inhibition may reflect the ability of BRCA2/RAD51 to drive recombination via the pathway that uses dsDNA donors (FIG. 14 left), which may compete with the alternative HDR pathway to carry out repair. This pathway can use donors complementary to either strand, albeit with differing efficiencies (FIGS. 10A-10C and 11A-11D), and subsequent events depend upon the strand used for repair. A donor complementary to the nicked strand (cN) can anneal to the free 3′-end of the target, and then serve as the template for repair synthesis primed by that 3′ end. Donor release then enables reannealing of the DNA duplex, followed by flap removal and ligation to complete HDR. Note the similarities with HDR at a nick using a dsDNA donor (FIG. 14, left), especially the requirement for 3′-5′ unwinding in both pathways. In the more efficient pathway, a donor complementary to the intact strand (cI) can anneal to the gap generated at the nick, forming a heteroduplex. The donor may then be ligated into the target (possibly requiring processing of donor or target ends), and heterology eliminated by mismatch repair or upon segregation (FIG. 14, left); or the donor may direct mismatch repair and be released in the course of repair synthesis (FIG. 19).

[0296] The pathways that support use of a ssDNA donor are also applicable to repair by a single-stranded region of a nicked dsDNA donor (FIGS. 20 and 21). In that context, this mechanism can be relevant to regulated diversification of immunoglobulin V regions by gene conversion (34), where cytidine deamination by Activation-Induced Deaminase (AID) is processed to generate a nick in the target, and repair is templated by upstream pseudogene donors. More generally, this mechanism can contribute to LOH. LOH without accompanying change in gene copy number occurs frequently in cancer cells and is an important source of mutations that drive tumorigenesis (35-37). LOH can occur if HDR uses an allelic region of the homologous chromosome as donor. If HDR between nicked homologs promotes LOH, then DNA nicks may constitute a more serious threat to genomic integrity than previously appreciated.

[0297] Alternative HDR at nicks is suppressed by canonical HDR, and can therefore be active in contexts in which canonical HDR is inactive. Examples include breast and ovarian cancers bearing BRCA2 mutations, and regions of solid tumors in which local hypoxic conditions downregulate canonical HDR (38-41). Recently, highly significant correlations have been documented between increased frequencies of loss of heterozygosity (LOH) and deficiencies in canonical HDR in primary breast and ovarian tumors and cell lines (42). This otherwise paradoxical observation may be explained if the alternative HDR pathway mediates LOH in these tumors, using the nicked homologous chromosome as donor.

[0298] Materials and Methods

[0299] Cell culture and transfection. Human cells lines were cultured as described (13). siRNA and DNA transfections were performed according to the manufacturer's protocol (Lipofectamine RNAiMAX and LTX, repectively; Life Technologies, Grand Island, N.Y.). PCR of cDNA was used to determine the efficiency of siRNA knockdown (FIG. 22).

[0300] Flow cytometry, HDR and mutEJ frequencies. Cells were processed for flow cytometry as described previously (13). In experiments with I-AniI, which was co-expressed with mTagBFP (BFP), data are presented as GFP+ and mCherry+ frequencies among BFP+ cells, except in cases where flow was carried out more than 8 days post-transfection, by which time the BFP signal was largely extinguished. HDR and mutEJ frequencies were displayed as mean and standard error of the mean (SEM).

### REFERENCES

[0301] 1. Caldecott K W (2008) Single-strand break repair and genetic disease Nat Rev Genet 9:619-631.
[0302] 2. Evans M D, Dizdaroglu M, & Cooke M S (2004) Oxidative DNA damage and disease: induction, repair and significance Mutat Res 567:1-61.
[0303] 3. Loeb L A & Harris C C (2008) Advances in chemical carcinogenesis: a historical review and prospective Cancer Res 68:6863-6872.
[0304] 4. Foti J J, Devadoss B, Winkler J A, Collins J J, & Walker G C (2012) Oxidation of the guanine nucleotide pool underlies cell death by bactericidal antibiotics Science 336:315-319.
[0305] 5. Gao Y, Katyal S, Lee Y, Zhao J, Rehg J E, Russell H R, & McKinnon P J (2011) DNA ligase III is critical for mtDNA integrity but not Xrcc1-mediated nuclear DNA repair Nature 471:240-244.
[0306] 6. Katyal S & McKinnon P J (2011) Disconnecting XRCC1 and DNA ligase III Cell Cycle 10:2269-2275.
[0307] 7. Simsek D, Furda A, Gao Y, Artus J, Brunet E, Hadjantonakis A K, Van Houten B, Shuman S, McKinnon P J, & Jasin M (2011) Crucial role for DNA ligase III in mitochondria but not in Xrcc1-dependent repair Nature 471:245-248.
[0308] 8. Hanssen-Bauer A, Solvang-Garten K, Gilljam K M, Torseth K, Wilson D M, 3rd, Akbari M, & Otterlei M (2012) The region of XRCC1 which harbours the three most common nonsynonymous polymorphic variants, is essential for the scaffolding function of XRCC1 DNA Repair (Amst) 11:357-366.
[0309] 9. Strathern J N, Weinstock K G, Higgins D R, & McGill C B (1991) A novel recombinator in yeast based on gene II protein from bacteriophage f1 Genetics 127:61-73.
[0310] 10. Arcangioli B (1998) A site- and strand-specific DNA break confers asymmetric switching potential in fission yeast EMBO J 17:4503-4510.
[0311] 11. Lee G S, Neiditch M B, Salus S S, & Roth D B (2004) RAG proteins shepherd double-strand breaks to a specific pathway, suppressing error-prone repair, but RAG nicking initiates homologous recombination Cell 117:171-184.
[0312] 12. McConnell Smith A, Takeuchi R, Pellenz S, Davis L, Maizels N, Monnat R J, Jr., & Stoddard B L (2009) Generation of a nicking enzyme that stimulates site-specific gene conversion from the I-AniI LAGLIDADG (SEQ ID NO: 218) homing endonuclease Proc Natl Acad Sci USA 106:5099-5104.
[0313] 13. Davis L & Maizels N (2011) DNA nicks promote efficient and safe targeted gene correction PLoS One 6:e23981.
[0314] 14. Ramirez C L, Certo M T, Mussolino C, Goodwin M J, Cradick T J, McCaffrey A P, Cathomen T, Scharenberg A M, & Joung J K (2012) Engineered zinc finger nickases induce homology-directed repair with reduced mutagenic effects Nucleic Acids Res 40:5560-5568.
[0315] 15. Heyer W D, Ehmsen K T, & Liu J (2010) Regulation of homologous recombination in eukaryotes Annu Rev Genet 44:113-139.
[0316] 16. Hanawalt P C & Spivak G (2008) Transcription-coupled DNA repair: two decades of progress and surprises Nat Rev Mol Cell Biol 9:958-970.
[0317] 17. Kathe S D, Shen G P, & Wallace S S (2004) Single-stranded breaks in DNA but not oxidative DNA base damages block transcriptional elongation by RNA polymerase II in HeLa cell nuclear extracts J Biol Chem 279:18511-18520.
[0318] 18. Certo M T, Ryu B Y, Annis J E, Garibov M, Jar]our J, Rawlings D J, & Scharenberg A M (2011) Tracking genome engineering outcome at individual DNA breakpoints Nat Methods 8:671-676.
[0319] 19. Taghian D G & Nickoloff J A (1997) Chromosomal double-strand breaks induce gene conversion at high frequency in mammalian cells Mol Cell Biol 17:6386-6393.
[0320] 20. Allen C, Miller C A, & Nickoloff J A (2003) The mutagenic potential of a single DNA double-strand break in a mammalian chromosome is not influenced by transcription DNA Repair (Amst) 2:1147-1156.
[0321] 21. Langston L D & Symington L S (2004) Gene targeting in yeast is initiated by two independent strand invasions Proc Natl Acad Sci USA 101:15392-15397.
[0322] 22. Storici F, Durham C L, Gordenin D A, & Resnick M A (2003) Chromosomal site-specific double-strand breaks are efficiently targeted for repair by oligonucleotides in yeast Proc Natl Acad Sci USA 100:14994-14999.
[0323] 23. Stark J M, Pierce A J, Oh J, Pastink A, & Jasin M (2004) Genetic steps of mammalian homologous repair with distinct mutagenic consequences Mol Cell Biol 24:9305-9316.
[0324] 24. Chen F, Pruett-Miller S M, Huang Y, G]oka M, Duda K, Taunton J, Collingwood T N, Frodin M, & Davis G D (2011) High-frequency genome editing using ssDNA oligonucleotides with zinc-finger nucleases Nat Methods 8:753-755.
[0325] 25. Stark J M, Hu P, Pierce A J, Moynahan M E, Ellis N, & Jasin M (2002) ATP hydrolysis by mammalian RAD51 has a key role during homology-directed DNA repair J Biol Chem 277:20185-20194.
[0326] 26. Tuft A, Bertwistle D, Valentine J, Gabriel A, Swift S, Ross G, Griffin C, Thacker J, & Ashworth A (2001) Mutation in Brca2 stimulates error-prone homology-directed repair of DNA double-strand breaks occurring between repeated sequences EMBO J 20:4704-4716.
[0327] 27. Ira G & Haber J E (2002) Characterization of RAD51-independent break-induced replication that acts preferentially with short homologous sequences Mol Cell Biol 22:6384-6392.
[0328] 28. Weinstock D M, Richardson C A, Elliott B, & Jasin M (2006) Modeling oncogenic translocations: distinct roles for double-strand break repair pathways in translocation formation in mammalian cells DNA Repair (Amst) 5:1065-1074.
[0329] 29. Bennardo N, Cheng A, Huang N, & Stark J M (2008) Alternative-NHEJ is a mechanistically distinct pathway of mammalian chromosome break repair PLoS Genet 4:e1000110.
[0330] 30. Goncalves M A, van Nierop G P, Holkers M, & de Vries A A (2012) Concerted nicking of donor and chromosomal acceptor DNA promotes homology-directed gene targeting in human cells Nucleic Acids Res 40:3443-3455.
[0331] 31. Mali P, Yang L, Esvelt K M, Aach J, Guell M, DiCarlo J E, Norville J E, & Church G M (2013) RNA-guided human genome engineering via Cas9 Science 339:823-826.
[0332] 32. Cromie G A, Hyppa R W, Taylor A F, Zakharyevich K, Hunter N, & Smith G R (2006) Single Holliday junctions are intermediates of meiotic recombination Cell 127:1167-1178.
[0333] 33. Smith G R (2004) How homologous recombination is initiated: unexpected evidence for single-strand nicks from v(d)j site-specific recombination Cell 117:146-148.
[0334] 34. Maizels N (2005) Immunoglobulin gene diversification Annu Rev Genet 39:23-46.
[0335] 35. Makishima H & Maciejewski J P (2011) Pathogenesis and consequences of uniparental disomy in cancer Clin Cancer Res 17:3913-3923.
[0336] 36. Score J & Cross N C (2012) Acquired uniparental disomy in myeloproliferative neoplasms Hematol Oncol Clin North Am 26:981-991.
[0337] 37. Pedersen B S & De S (2013) Loss of heterozygosity preferentially occurs in early replicating regions in cancer genomes Nucleic Acids Res 41:7615-7624.
[0338] 38. Bindra R S, Schaffer P J, Meng A, Woo J, Maseide K, Roth M E, Lizardi P, Hedley D W, Bristow R G, & Glazer P M (2004) Down-regulation of Rad51 and decreased homologous recombination in hypoxic cancer cells Mol Cell Biol 24:8504-8518.
[0339] 39. Meng A X, Jalali F, Cuddihy A, Chan N, Bindra R S, Glazer P M, & Bristow R G (2005) Hypoxia down-regulates DNA double strand break repair gene expression in prostate cancer cells Radiother Oncol 76:168-176.
[0340] 40. Bristow R G & Hill R P (2008) Hypoxia and metabolism. Hypoxia, DNA repair and genetic instability Nat Rev Cancer 8:180-192.
[0341] 41. Klein T J & Glazer P M (2010) The tumor microenvironment and DNA repair Semin Radiat Oncol 20:282-287.
[0342] 42. Abkevich V, Timms K M, Hennessy B T, Potter J, Carey M S, Meyer L A, Smith-McCune K, Broaddus R, Lu K H, Chen J, et al. (2012) Patterns of genomic loss of heterozygosity
   predict homologous recombination repair defects in epithelial ovarian cancer Br J Cancer 107:1776-1782.

[0343] Supplemental Methods and Materials

[0344] Cell culture and transfection. The human embryonic kidney cell line HEK293T and Flp-In™ T-REx™-293 (Invitrogen), the human epithelial fibrosarcoma cell line HT1080 and their derivatives were grown at 37° C., 5% CO2 in Dulbecco-modified Eagle's medium (Hyclone) supplemented with 10% fetal bovine serum (Atlanta Biological, Lawrenceville, Ga.) and 200 units/ml penicillin, 200 μg/ml streptomycin (Hyclone) and 2 mM L-glutamine (Hyclone). TLTP and TLNT cell populations were created by lentiviral transduction using lentivirus derived from the TLTP and TLNT vectors (described below). TetON-TL cell lines were created by cotransfecting Flp-In™ T-REx™-293 cells with either pTetON-TLTP (described below) and pOG44 or with pTetON-TLNT (described below) and pOG44.

[0345] Transfections of expression plasmids and donor DNA were performed using Lipofectamine LTX™ (Life Technologies, Grand Island, N.Y.) according to the manufacturer's protocol. Briefly, transfection mixes consisted of approximately 1 μg of DNA and 2.5 μl of Lipofectamine LTX per 200 pl serum free DMEM or OptiMEM™ (Life Technologies). In experiments using I-AniI, transfecting DNA consisted of 300 ng I-AniI expression plasmid, 75 ng RAD51K133R expression plasmid where indicated, and either 500 ng (approximately 0.16 pmol) pCS14GFP dsDNA plasmid donor, or 0.6-0.7 pl of 33 pM (20 pmol) oligonucleotide donor per 200 pl serum free DMEM. In experiments using Cas9, transfecting DNA consisted of 250 ng Cas9 expression plasmid, 150 ng guide RNA expression plasmid and either 250 ng pCS14GFP dsDNA plasmid donor or 0.7 pl of 33 pM oligonucleotide donor per 200 pl OptiMEM™. When siRNA was not used, 293T or HT1080 cells were seeded at approximately 2×105 (293T) or 1×105 (HT1080) cells/ml and transfected the following day. In experiments not involving the TetON-TL reporter, cells were expanded 1 day post-transfection and collected for analysis 3 days post-transfection. For TetON-TL experiments, transfections were performed in either the presence or absence of 1 pg/ml doxycycline, cells were then expanded 1 day post-transfection and cultured for 8-9 more days in the presence or absence of doxycycline and then for one additional day in the presence of 1 pg/ml doxycycline prior to collection.

[0346] Transfections of siRNA in FIG. 11A and FIG. 18C were performed using Lipofectamine RNAiMAX™ (Life Technologies) according to the manufacturer's protocol. Briefly, 5.5×105 cells were seeded in 3 ml media in 6 cm plates (dl) and transfected (d2) with 60 pmol siRNA. Cells were split (d4) into 24- or 12-well plates at 1 or 2×105 cells/well, and 2-4 hr later were transfected a second time with siRNA; then transfected (d5) with expression plasmids and donor DNA, and expanded (d6) and collected for analysis (d8) as above.

[0347] Transfections of siRNA in FIGS. 11C and 12A-12D were performed using Lipofectamine RNAiMAX™ (Life Technologies). Briefly, on day 1, 4000 cells per well were plated in 0.1 ml media in a 96-well plate. On day 2, 10 pl of OptiMEM containing 0.125 pl RNAiMAX™ and 0.4 pl of 0.625 pM siRNA was added per well. On day 3, 20 pl of OptiMEM™ containing transfecting DNAs (expression constructs and donors, as above) and 0.2 μl of Lipofectamine LTX™ was added per well. Cells were collected for analysis on day 6, 3 days after transfection with DNAs.

[0348] siRNA used were as follows: NT2, RAD51 and BRCA2 siRNA (Life Technologies; 4390846, s11734 and s2085, respectively); BRCA1 (Qiagen; SI02664361 and SI02664368, pooled).

[0349] Flow cytometry. Cells were fixed in 2% formaldehyde and analyzed on an LSR II™ flow cytometer (Becton Dickinson, Franklin Lakes, N.J.). At least 100,000 events were gated for linear side scatter and forward scatter to identify cells, and cells gated for linear forward scatter height and width and side scatter height and width to eliminate doublets. In all experiments I-AniI was co-expressed with mTagBFP (BFP). Data are presented as GFP+ and mCherry+ frequencies among BFP+ cells, except in FIGS. 9D and 12B where late time points precluded meaningful measurements of BFP+ cells. GFP, mCherry, and mTagBFP fluorescence were detected with 488 nm, 561 nm 406 nm and 641 nm lasers, respectively. Data were analyzed using FlowJo™ (Tree Star, Ashland, Oreg.) flow cytometry analysis software and frequencies were transferred to Microsoft Excel™ in which statistical significance was determined by two-tailed t-test (FIG. 23). In all experiments I-AniI was co-expressed with mTagBFP (BFP) and all experiments, except those involving the TetON-TL reporter or Cas9, are presented as GFP+ and mCherry+ frequencies among BFP+ cells. In the TLTP and TLNT cell populations, a small background population of mCherry+ cells was detected upon expression of catalytically inactive I-AniI (TLTP; 0.016% and TLNT; 0.107%); this background was subtracted to give the data presented in FIG. 12A.

[0350] Expression analysis of siRNA treated 293T-TL7TP cells. RNA was isolated from cells at 48 hrs post siRNA transfection using the RNeasy Plus Mini™ Kit (Qiagen, Valencia, Calif.). cDNAs were synthesized using the QuantiTect™ Reverse Transcription Kit (Qiagen), and used as template for PCR using primers directed against the indicated genes. Band intensities were analyzed using Image Lab™ Software (Bio-Rad, Hercules, Calif.).

[0351] Plasmids. I-AniI expression vectors (1) and the TLTP reporter plasmid (pCVL Traffic Light Reporter 1.1™ (Ani target) Efla Puro), dsDNA donor plasmid (pCVL SFFV d14GFP Donor [referred to here as pCS14GFP])(2), hCas9 and gRNA_Cloning Vector (3) were previously described. The TLNT vector was made by PCR of the TLTP reporter plasmid with primers TLR_Ani2opp and TLR_Ani2opp-r. The TetON-TLNT and TetON-TLTP plasmids were made by performing PCR on the TLNT and TLTP vectors using primers SalI-GFP-F and PacI-mCh-R. The resulting PCR products were cloned into XhoI/PacI digested pFTSH_SbfI-PacI, a version of pcDNATM5/FRT/TO. Derivatives of pEGFP-N1 (Invitrogen, Carlsbad, Calif.) were used as donor in experiments that used nickable donors. These were made by digesting pEGFP-N1 with Bpu10I and replacing the 15-nt between the two Bpu10I sites at the 3′ end of the gene with annealed oligos (Bpu10I_{—}2×STOP, Bpu10I_AniTP, Bpu10I_AniNT and there complements) creating pG-no, pGAn-TP and pGAn-NT. The RAD51K133R expression plasmid (pCMV-RAD51K133R-T2A-IFP-1.4) was constructed by amplifying the human RAD51 gene by RT-PCR using primers hRAD51-F1 and hRAD51-R1, cloning into PCR2.1 using the Zero Blunt® TOPO® PCR Cloning Kit (Invitrogen, Carlsbad, Calif.), and then introducing the K133R mutation by site directed mutagenesis using primer RAD51-QC(K133R) and its complement. RAD51K133R was amplified by PCR using primers SgflRAD51-F and RAD51MluI-R, cleaved with SgfI and MluI, and cloned in frame with the IFP1.4 far-red fluorescent protein (4) separated by a T2A linker. The guide RNA directed against the TLTP reporter was constructed by annealing oligos AniTrLt-gDNA1-F and AniTrLt-gDNA1-R then extending then using Pfu Turbo™ polymerase (Agilent, Santa Clara, Calif.). The extended oligos were cloned into the AflII digested gRNA_Cloning Vector using the Gibson Assembly™ Master Mix (New England Biolabs, Ipswich, Mass.). The Cas9D10A expression plasmid was derived from pCas9 by site directed mutagenesis using oligo Cas9_D10A-QC and its complement.

[0352] Donor oligonucleotides. Regions of heterology are in lower case letters. In experiments using the TLTP reporter, which is nicked on the transcribed strand, oligos referred to as cN are designated below as TOP and those referred to as cI are designated below as BOT. In experiments using the TLNT reporter, which is nicked on the non-transcribed strand, oligos referred to as cN are designated below as BOT and those referred to as cI are designated below as TOP.

99-TOP:
(SEQ ID NO: 174)
5′-TGGACGGCGACGTAAACGGCCACAAGTTCAGCGTGTCCGGCgagggc
gagggcgatgcCACCTACGGCAAGCTGACCCTGAAGTTCATCTGCACCAC
CG-3′
99-BOT:
(SEQ ID NO: 175)
5′-CGGTGGTGCAGATGAACTTCAGGGTCAGCTTGCCGTAGGTGgcatcg
ccctcaccctcGCCGGACACGCTGAACTTGTGGCCGTTTACGTCGCCGTC
CA-3′
75-TOP:
(SEQ ID NO: 176)
5′-TAAACGGCCACAAGTTCAGCGTGTCCGGCgagggtgagggcgatgcC
ACCTACGGCAAGCTGACCCTGAAGTTCA-3′
75-BOT:
(SEQ ID NO: 177)
5′-TGAACTTCAGGGTCAGCTTGCCGTAGGTGgcatcgccctcaccctcG
CCGGACACGCTGAACTTGTGGCCGTTTA-3′
75-TOPleft:
(SEQ ID NO: 178)
5′-TGGACGGCGACGTAAACGGCCACAAGTTCAGCGTGTCCGGCgagggt
gagggcgatgcCACCTACGGCAAGCTGA-3′
75-BOTleft:
(SEQ ID NO: 179)
5′-TCAGCTTGCCGTAGGTGgcatcgccctcaccctcGCCGGACACGCTG
AACTTGTGGCCGTTTACGTCGCCGTCCA-3′
75-TOPright:
(SEQ ID NO: 180)
5′-AGTTCAGCGTGTCCGGCgagggtgagggcgatgcCACCTACGGCAAG
CTGACCCTGAAGTTCATCTGCACCACCG-3′
75-BOTright:
(SEQ ID NO: 181)
5′-CGGTGGTGCAGATGAACTTCAGGGTCAGCTTGCCGTAGGTGgcatcg
ccctcaccctcGCCGGACACGCTGAACT-3′
BRCA1-RT1-F:
(SEQ ID NO: 182)
5′-GAGCTCGCTGAGACTTCCTG-3′
BRCA1-RT1-R:
(SEQ ID NO: 183)
5′-ACTCCAGACAGATGGGACACT-3′
BRCA2-RT1-F:
(SEQ ID NO: 184)
5′-GTTCCCTCTGCGTGTTCTCA-3′
BRCA2-RT1-R:
(SEQ ID NO: 185)
5′-CCATCCACCATCAGCCAACT-3′
RAD51-RT1-F:
(SEQ ID NO: 186)
5′-GCGAGTAGAGAAGTGGAGCG-3′
RAD51-RT1-R:
(SEQ ID NO: 187)
5′-TTAGCTCCTTCTTTGGCGCA-3′
LDHA-RT1-F:
(SEQ ID NO: 188)
5′-TCTTGACCTACGTGGCTTGG-3′
LDHA-RT1-R:
(SEQ ID NO: 189)
5′-AAGCACTCTCAACCACCTGC-3′

[0353] Other oligonucleotide sequences:

TLR_Ani2opp:
(SEQ ID NO: 190)
5′-gtttacagagaaacctcctcagctaatagctcacctacggc-3′
TLR Ani2opp-r:
(SEQ ID NO: 191)
5′-ctgaggaggtttctctgtaaacggtcgaggccggac-3′.
SalI-GFP-F:
(SEQ ID NO: 192)
5′-GTAGTCGACGCCACCATGGTGAGC-3′
PacI-mCh-R:
(SEQ ID NO: 193)
5′-GCATTAATTAAGAGCCTCTGCATTCACTTG-3′
Bpu10I_2xSTOP:
(SEQ ID NO: 194)
5′-tgagcacctagtaagccc-3′
Bpu10I_2xSTOP-R:
(SEQ ID NO: 195)
5′-tcagggcttactaggtgc-3′
Bpu10I_AniTL-TP:
(SEQ ID NO: 196)
5′-tgaggaggtttctctgtaaa-3′
Bpu10I_AniTL-TP-R:
(SEQ ID NO: 197)
5′-tcatttacagagaaacctcc-3′
Bpu10I_AniTL-NT:
(SEQ ID NO: 198)
5′-tgatttacagagaaacctcctca-3′
Bpu10I_AniTL-NT-R:
(SEQ ID NO: 199)
5′-tcatgaggaggtttctctgtaaa-3′
hRad51-F1:
(SEQ ID NO: 200)
5′-ATGGCAATGCAGATGCAG-3′
hRad51-R1:
(SEQ ID NO: 201)
5′-TCAGTCTTTGGCATCTCCC-3′
RAD51-QC(K133R):
(SEQ ID NO: 202)
5′-GGAGAATTCCGAACTGGGAgGACCCAGATCTGTCATACG-3′
SgfIRAD51-F:
(SEQ ID NO: 203)
5′-GCTTAAGGCGATCGCCATGGCAATGCAGATGCAGC-3′
RAD51MluI-R:
(SEQ ID NO: 204)
5′-GTAACGCGTGTCTTTGGCATCTCCCACTCC-3′
AniTrLt-gDNA1-F:
(SEQ ID NO: 205)
5′-tttcttggctttatatatcttgtggaaaggacgaaacaccggtgtcc
ggcctcgaccgtg-3′
AniTrLt-gDNA1-R:
(SEQ ID NO: 206)
5′-gactagccttattttaacttgctatttctagctctaaaaccacggtc
gaggccggacacc-3′
Cas9_D10A-QC:
(SEQ ID NO: 207)
5′-gaagtactccattgggctcgctatcggcacaaacagcgtc-3′

[0354] Supplemental Methods & Materials References
[0355] 1. Davis L & Maizels N (2011) DNA nicks promote efficient and safe targeted gene
   correction PLoS One 6:e23981.
[0356] 2. Certo M T, Ryu B Y, Annis J E, Garibov M, Jarjour J, Rawlings D J, & Scharenberg A M (2011) Tracking genome engineering outcome at individual DNA breakpoints Nat Methods 8:671-676.
[0357] 3. Mali P, Yang L, Esvelt K M, Aach J, Guell M, DiCarlo J E, Norville J E, & Church G M (2013) RNA-guided human genome engineering via Cas9 Science 339:823-826.
[0358] 4. Shu X, Royant A, Lin M Z, Aguilera T A, Lev-Ram V, Steinbach P A, & Tsien R Y (2009) Mammalian expression of infrared fluorescent proteins engineered from a bacterial phytochrome Science 324:804-807.

### Example 3

[0359] The frequency of homology-directed repair (HDR) at a nick using a ssDNA donor is increased upon siRNA knockdown of RAD51, BRCA2 or BRCA2-interacting factors PALB2 or SHFM1 to levels higher than that of HDR at a double-strand break (DSB) (FIG. 24). The ratio of HDR to mutEJ (local mutagenesis) is higher at a nick than at a DSB, in untreated cells and especially in cells in which RAD51, BRCA2 or BRCA2—interacting factors PALB2 or SHFM1 are knocked down by siRNA treatment (FIG. 25).

### Example 4

[0360] The tagging of endogenous RECQL5 using alternative HDR is depicted in FIG. 26. Using the methods described herein, an HA “tag” was added to the 3′ end of genomic RECQL5. Nested PCR demonstrated the successful insertion of the tag into the desired genomic locus.

1. (canceled)

2. A method of modifying the sequence of a target nucleic acid molecule, the method comprising contacting the target nucleic acid molecule with
a) a donor nucleic acid molecule comprising the modification to be made in the target nucleic acid molecule;
b) a nickase; and
c) an inhibitor of RAD51; BRCA2; PALB2 or SHFM1.

3. The method of claim 2, wherein a cell-free system comprises the target nucleic acid molecule.

4. The method of claim 2, wherein a cell comprises the target nucleic acid molecule.

5. (canceled)

6. (canceled)

7. (canceled)

8. The method of claim 2, wherein the nickase is selected from the group consisting of:
a nuclease with one active site disabled; I-AniI with one active site disabled; or Cas9^{D10A}.

9. The method of claim 2, wherein the donor nucleic acid molecule is a ssDNA or nicked dsDNA.

10. The method of claim 2, wherein the donor nucleic acid molecule comprises a portion complementary to the strand of the target nucleic acid molecule that is not nicked by the nickase.

11. The method of claim 10, wherein the portion of the donor nucleic acid molecule that is complementary to a strand of the target nucleic acid molecule is substantially centered with respect to the location of the nick.

12. A method of modifying the sequence of a target nucleic acid molecule, the method comprising contacting the target nucleic acid molecule with
a) a ssDNA donor nucleic acid molecule comprising the modification to be made in the target nucleic acid molecule;
b) a nuclease; and
c) an inhibitor of RAD51; BRCA2; PALB2 or SHFM1.

13. The method of claim 12, wherein a cell-free system comprises the target nucleic acid molecule.

14. The method of claim 12, wherein a cell comprises the target nucleic acid molecule.

15. (canceled)

16. (canceled)

17. The method of claim 12, wherein the donor nucleic acid molecule comprises a portion complementary to one strand of the target nucleic acid molecule.

18. The method of claim 12, wherein the nuclease is selected from the group consisting of:
nucleases comprising a FokI cleavage domain; zinc finger nucleases; TALE nucleases; RNA-guided engineered nucleases; Cas9; Cas9-derived nucleases; and homing endonucleases.

19. The method of claim 2, wherein the modification is introduced as a gene therapy.

20. The method of claim 2, wherein the inhibitor is an inhibitory nucleic acid; an antibody reagent; or selected from the group consisting of IBR2; RI-1; RI-2; and B02.

21. (canceled)

22. (canceled)

23. The method of claim 2, wherein the donor nucleic acid molecule is at least about 25 nt in length.

24. (canceled)

25. The method of claim 2, further comprising the step of implanting a cell comprising the modified nucleic acid molecule into a subject.

26. The method of claim 25, wherein the cell is autologous to the subject and/or is an iPS cell.

27. (canceled)

28. (canceled)

29. (canceled)

30. (canceled)

31. (canceled)

32. A method of decreasing genomic instability in a cell, the method comprising contacting the cell with an agonist of RAD51; BRCA2; PALB2 or SHFM1 or an inhibitor of BRCA1.

33. (canceled)

34. (canceled)

35. (canceled)

36. The method of claim 32, wherein the cell is a cancerous cell.

37. (canceled)

38. The method of claim 32, wherein the contacting step comprises administering the agonist or inhibitor to a subject in need of treatment for a risk of genomic instability.

39.-48. (canceled)

The application's sequence listing, which the Patent Office published only in electronic form, follows.

SEQUENCE LISTING (218 sequences)

SEQ ID NO: 1 - DNA, 5388 bp, Homo sapiens
aaaatgttggagatctgcctgaagctggtgggctgcaaatccaagaaggggctgtcctcgtcctccagctgttatctggaagaagcccttcagcggccagtagcatctgactttgagcctcagggtctgagtgaagccgctcgttggaactccaaggaaaaccttctcgctggacccagtgaaaatgaccccaaccttttcgttgcactgtatgattttgtggccagtggagataacactctaagcataactaaaggtgaaaagctccgggtcttaggctataatcacaatggggaatggtgtgaagcccaaaccaaaaatggccaaggctgggtcccaagcaactacatcacgccagtcaacagtctggagaaacactcctggtaccatgggcctgtgtcccgcaatgccgctgagtatctgctgagcagcgggatcaatggcagcttcttggtgcgtgagagtgagagcagtcctggccagaggtccatctcgctgagatacgaagggagggtgtaccattacaggatcaacactgcttctgatggcaagctctacgtctcctccgagagccgcttcaacaccctggccgagttggttcatcatcattcaacggtggccgacgggctcatcaccacgctccattatccagccccaaagcgcaacaagcccactgtctatggtgtgtcccccaactacgacaagtgggagatggaacgcacggacatcaccatgaagcacaagctgggcgggggccagtacggggaggtgtacgagggcgtgtggaagaaatacagcctgacggtggccgtgaagaccttgaaggaggacaccatggaggtggaagagttcttgaaagaagctgcagtcatgaaagagatcaaacaccctaacctggtgcagctccttggggtctgcacccgggagcccccgttctatatcatcactgagttcatgacctacgggaacctcctggactacctgagggagtgcaaccggcaggaggtgaacgccgtggtgctgctgtacatggccactcagatctcgtcagccatggagtacctggagaagaaaaacttcatccacagagatcttgctgcccgaaactgcctggtaggggagaaccacttggtgaaggtagctgattttggcctgagcaggttgatgacaggggacacctacacagcccatgctggagccaagttccccatcaaatggactgcacccgagagcctggcctacaacaagttctccatcaagtccgacgtctgggcatttggagtattgctttgggaaattgctacctatggcatgtccccttacccgggaattgacctgtcccaggtgtatgagctgctagagaaggactaccgcatggagcgcccagaaggctgcccagagaaggtctatgaactcatgcgagcatgttggcagtggaatccctctgaccggccctcctttgctgaaatccaccaagcctttgaaacaatgttccaggaatccagtatctcagacgaagtggaaaaggagctggggaaacaaggcgtccgtggggctgtgagtaccttgctgcaggccccagagctgcccaccaagacgaggacctccaggagagctgcagagcacagagacaccactgacgtgcctgagatgcctcactccaagggccagggagagagcgatcctctggaccatgagcctgccgtgtctccattgctccctcgaaaagagcgaggtcccccggagggcggcctgaatgaagatgagcgccttctccccaaagacaaaaagaccaacttgttcagcgccttgatcaagaagaagaagaagacagccccaacccctcccaaacgcagcagctccttccgggagatggacggccagccggagcgcagaggggccggcgaggaagagggccgagacatcagcaacggggcactggctttcacccccttggacacagctgacccagccaagtccccaaagcccagcaatggggctggggtccccaatggagccctccgggagtccgggggctcaggcttccggtctccccacctgtggaagaagtccagcacgctgaccagcagccgcctagccaccggcgaggaggagggcggtggcagctccagcaagcgcttcctgcgctcttgctccgcctcctgcgttccccatggggccaaggacacggagtggaggtcagtcacgctgcctcgggacttgcagtccacgggaagacagtttgactcgtccacatttggagggcacaaaagtgagaagccggctctgcctcggaagagggcaggggagaacaggtctgaccaggtgacccgaggcacagtaacgcctccccccaggctggtgaaaaagaatgaggaagctgctgatgaggtcttcaaagacatcatggagtccagcccgggctccagcccgcccaacctgactccaaaacccctccggcggcaggtcaccgtggcccctgcctcgggcctcccccacaaggaagaagctggaaagggcagtgccttagggacccctgctgcagctgagccagtgacccccaccagcaaagcaggctcaggtgcaccagggggcaccagcaagggccccgccgaggagtccagagtgaggaggcacaagcactcctctgagtcgccagggagggacaaggggaaattgtccaggctcaaacctgccccgccgcccccaccagcagcctctgcagggaaggctggaggaaagccctcgcagagcccgagccaggaggcggccggggaggcagtcctgggcgcaaagacaaaagccacgagtctggttgatgctgtgaacagtgacgctgccaagcccagccagccgggagagggcctcaaaaagcccgtgctcccggccactccaaagccacagtccgccaagccgtcggggacccccatcagcccagcccccgttccctccacgttgccatcagcatcctcggccctggcaggggaccagccgtcttccaccgccttcatccctctcatatcaacccgagtgtctcttcggaaaacccgccagcctccagagcggatcgccagcggcgccatcaccaagggcgtggtcctggacagcaccgaggcgctgtgcctcgccatctctaggaactccgagcagatggccagccacagcgcagtgctggaggccggcaaaaacctctacacgttctgcgtgagctatgtggattccatccagcaaatgaggaacaagtttgccttccgagaggccatcaacaaactggagaataatctccgggagcttcagatctgcccggcgacagcaggcagtggtccagcggccactcaggacttcagcaagctcctcagttcggtgaaggaaatcagtgacatagtgcagaggtagcagcagtcaggggtcaggtgtcaggcccgtcggagctgcctgcagcacatgcgggctcgcccatacccgtgacagtggctgacaagggactagtgagtcagcaccttggcccaggagctctgcgccaggcagagctgagggccctgtggagtccagctctactacctacgtttgcaccgcctgccctcccgcaccttcctcctccccgctccgtctctgtcctcgaattttatctgtggagttcctgctccgtggactgcagtcggcatgccaggacccgccagccccgctcccacctagtgccccagactgagctctccaggccaggtgggaacggctgatgtggactgtctttttcatttttttctctctggagcccctcctcccccggctgggcctccttcttccacttctccaagaatggaagcctgaactgaggccttgtgtgtcaggccctctgcctgcactccctggccttgcccgtcgtgtgctgaagacatgtttcaagaaccgcatttcgggaagggcatgcacgggcatgcacacggctggtcactctgccctctgctgctgcccggggtggggtgcactcgccatttcctcacgtgcaggacagctcttgatttgggtggaaaacagggtgctaaagccaaccagcctttgggtcctgggcaggtgggagctgaaaaggatcgaggcatggggcatgtcctttccatctgtccacatccccagagcccagctcttgctctcttgtgacgtgcactgtgaatcctggcaagaaagcttgagtctcaagggtggcaggtcactgtcactgccgacatccctcccccagcagaatggaggcaggggacaagggaggcagtggctagtggggtgaacagctggtgccaaatagccccagactgggcccaggcaggtctgcaagggcccagagtgaaccgtcctttcacacatctgggtgccctgaaagggcccttcccctcccccactcctctaagacaaagtagattcttacaaggccctttcctttggaacaagacagccttcacttttctgagttcttgaagcatttcaaagccctgcctctgtgtagccgccctgagagagaatagagctgccactgggcacctgcgcacaggtgggaggaaagggcctggccagtcctggtcctggctgcactcttgaactgggcgaatgtcttatttaattaccgtgagtgacatagcctcatgttctgtgggggtcatcagggagggttaggaaaaccacaaacggagcccctgaaagcctcacgtatttcacagagcacgcctgccatcttctccccgaggctgccccaggccggagcccagatacgggggctgtgactctgggcagggacccggggtctcctggaccttgacagagcagctaactccgagagcagtgggcaggtggccgcccctgaggcttcacgccgggagaagccaccttcccaccccttcataccgcctcgtgccagcagcctcgcacaggccctagctttacgctcatcacctaaacttgtactttatttttctgatagaaatggtttcctctggatcgttttatgcggttcttacagcacatcacctctttgcccccgacggctgtgacgcagccggagggaggcactagtcaccgacagcggccttgaagacagagcaaagcgcccacccaggtcccccgactgcctgtctccatgaggtactggtcccttccttttgttaacgtgatgtgccactatattttacacgtatctcttggtatgcatcttttatagacgctcttttctaagtggcgtgtgcatagcgtcctgccctgccccctcgggggcctgtggtggctccccctctgcttctcggggtccagtgcattttgtttctgtatatgattctctgtggttttttttgaatccaaatctgtcctctgtagtattttttaaataaatcagtgtttacattagaa

SEQ ID NO: 2 - DNA, 13147 bp, Homo sapiens
ccggagcccgagccgaagggcgagccgcaaacgctaagtcgctggccattggtggacatggcgcaggcgcgtttgctccgacgggccgaatgttttggggcagtgttttgagcgcggagaccgcgtgatactggatgcgcatgggcataccgtgctctgcggctgcttggcgttgcttcttcctccagaagtgggcgctgggcagtcacgcagggtttgaaccggaagcgggagtaggtagctgcgtggctaacggagaaaagaagccgtggccgcgggaggaggcgagaggagtcgggatctgcgctgcagccaccgccgcggttgatactactttgaccttccgagtgcagtgacagtgatgtgtgttctgaaattgtgaaccatgagtctagtacttaatgatctgcttatctgctgccgtcaactagaacatgatagagctacagaacgaaagaaagaagttgagaaatttaagcgcctgattcgagatcctgaaacaattaaacatctagatcggcattcagattccaaacaaggaaaatatttgaattgggatgctgtttttagatttttacagaaatatattcagaaagaaacagaatgtctgagaatagcaaaaccaaatgtatcagcctcaacacaagcctccaggcagaaaaagatgcaggaaatcagtagtttggtcaaatacttcatcaaatgtgcaaacagaagagcacctaggctaaaatgtcaagaactcttaaattatatcatggatacagtgaaagattcatctaatggtgctatttacggagctgattgtagcaacatactactcaaagacattctttctgtgagaaaatactggtgtgaaatatctcagcaacagtggttagaattgttctctgtgtacttcaggctctatctgaaaccttcacaagatgttcatagagttttagtggctagaataattcatgctgttaccaaaggatgctgttctcagactgacggattaaattccaaatttttggactttttttccaaggctattcagtgtgcgagacaagaaaagagctcttcaggtctaaatcatatcttagcagctcttactatcttcctcaagactttggctgtcaactttcgaattcgagtgtgtgaattaggagatgaaattcttcccactttgctttatatttggactcaacataggcttaatgattctttaaaagaagtcattattgaattatttcaactgcaaatttatatccatcatccgaaaggagccaaaacccaagaaaaaggtgcttatgaatcaacaaaatggagaagtattttatacaacttatatgatctgctagtgaatgagataagtcatataggaagtagaggaaagtattcttcaggatttcgtaatattgccgtcaaagaaaatttgattgaattgatggcagatatctgtcaccaggtttttaatgaagataccagatccttggagatttctcaatcttacactactacacaaagagaatctagtgattacagtgtcccttgcaaaaggaagaaaatagaactaggctgggaagtaataaaagatcaccttcagaagtcacagaatgattttgatcttgtgccttggctacagattgcaacccaattaatatcaaagtatcctgcaagtttacctaactgtgagctgtctccattactgatgatactatctcagcttctaccccaacagcgacatggggaacgtacaccatatgtgttacgatgccttacggaagttgcattgtgtcaagacaagaggtcaaacctagaaagctcacaaaagtcagatttattaaaactctggaataaaatttggtgtattacctttcgtggtataagttctgagcaaatacaagctgaaaactttggcttacttggagccataattcagggtagtttagttgaggttgacagagaattctggaagttatttactgggtcagcctgcagaccttcatgtcctgcagtatgctgtttgactttggcactgaccaccagtatagttccaggaacggtaaaaatgggaatagagcaaaatatgtgtgaagtaaatagaagcttttctttaaaggaatcaataatgaaatggctcttattctatcagttagagggtgacttagaaaatagcacagaagtgcctccaattcttcacagtaattttcctcatcttgtactggagaaaattcttgtgagtctcactatgaaaaactgtaaagctgcaatgaattttttccaaagcgtgccagaatgtgaacaccaccaaaaagataaagaagaactttcattctcagaagtagaagaactatttcttcagacaacttttgacaagatggactttttaaccattgtgagagaatgtggtatagaaaagcaccagtccagtattggcttctctgtccaccagaatctcaaggaatcactggatcgctgtcttctgggattatcagaacagcttctgaataattactcatctgagattacaaattcagaaactcttgtccggtgttcacgtcttttggtgggtgtccttggctgctactgttacatgggtgtaatagctgaagaggaagcatataagtcagaattattccagaaagccaagtctctaatgcaatgtgcaggagaaagtatcactctgtttaaaaataagacaaatgaggaattcagaattggttccttgagaaatatgatgcagctatgtacacgttgcttgagcaactgtaccaagaagagtccaaataagattgcatctggctttttcctgcgattgttaacatcaaagctaatgaatgacattgcagatatttgtaaaagtttagcatccttcatcaaaaagccatttgaccgtggagaagtagaatcaatggaagatgatactaatggaaatctaatggaggtggaggatcagtcatccatgaatctatttaacgattaccctgatagtagtgttagtgatgcaaacgaacctggagagagccaaagtaccataggtgccattaatcctttagctgaagaatatctgtcaaagcaagatctacttttcttagacatgctcaagttcttgtgtttgtgtgtaactactgctcagaccaatactgtgtcctttagggcagctgatattcggaggaaattgttaatgttaattgattctagcacgctagaacctaccaaatccctccacctgcatatgtatctaatgcttttaaaggagcttcctggagaagagtaccccttgccaatggaagatgttcttgaacttctgaaaccactatccaatgtgtgttctttgtatcgtcgtgaccaagatgtttgtaaaactattttaaaccatgtccttcatgtagtgaaaaacctaggtcaaagcaatatggactctgagaacacaagggatgctcaaggacagtttcttacagtaattggagcattttggcatctaacaaaggagaggaaatatatattctctgtaagaatggccctagtaaattgccttaaaactttgcttgaggctgatccttattcaaaatgggccattcttaatgtaatgggaaaagactttcctgtaaatgaagtatttacacaatttcttgctgacaatcatcaccaagttcgcatgttggctgcagagtcaatcaatagattgttccaggacacgaagggagattcttccaggttactgaaagcacttcctttgaagcttcagcaaacagcttttgaaaatgcatacttgaaagctcaggaaggaatgagagaaatgtcccatagtgctgagaaccctgaaactttggatgaaatttataatagaaaatctgttttactgacgttgatagctgtggttttatcctgtagccctatctgcgaaaaacaggctttgtttgccctgtgtaaatctgtgaaagagaatggattagaacctcaccttgtgaaaaaggttttagagaaagtttctgaaacttttggatatagacgtttagaagactttatggcatctcatttagattatctggttttggaatggctaaatcttcaagatactgaatacaacttatcttcttttccttttattttattaaactacacaaatattgaggatttctatagatcttgttataaggttttgattccacatctggtgattagaagtcattttgatgaggtgaagtccattgctaatcagattcaagaggactggaaaagtcttctaacagactgctttccaaagattcttgtaaatattcttccttattttgcctatgagggtaccagagacagtgggatggcacagcaaagagagactgctaccaaggtctatgatatgcttaaaagtgaaaacttattgggaaaacagattgatcacttattcattagtaatttaccagagattgtggtggagttattgatgacgttacatgagccagcaaattctagtgccagtcagagcactgacctctgtgacttttcaggggatttggatcctgctcctaatccacctcattttccatcgcatgtgattaaagcaacatttgcctatatcagcaattgtcataaaaccaagttaaaaagcattttagaaattctttccaaaagccctgattcctatcagaaaattcttcttgccatatgtgagcaagcagctgaaacaaataatgtttataagaagcacagaattcttaaaatatatcacctgtttgttagtttattactgaaagatataaaaagtggcttaggaggagcttgggcctttgttcttcgagacgttatttatactttgattcactatatcaaccaaaggccttcttgtatcatggatgtgtcattacgtagcttctccctttgttgtgacttattaagtcaggtttgccagacagccgtgacttactgtaaggatgctctagaaaaccatcttcatgttattgttggtacacttataccccttgtgtatgagcaggtggaggttcagaaacaggtattggacttgttgaaatacttagtgatagataacaaggataatgaaaacctctatatcacgattaagcttttagatccttttcctgaccatgttgtttttaaggatttgcgtattactcagcaaaaaatcaaatacagtagaggacccttttcactcttggaggaaattaaccattttctctcagtaagtgtttatgatgcacttccattgacaagacttgaaggactaaaggatcttcgaagacaactggaactacataaagatcagatggtggacattatgagagcttctcaggataatccgcaagatgggattatggtgaaactagttgtcaatttgttgcagttatccaagatggcaataaaccacactggtgaaaaagaagttctagaggctgttggaagctgcttgggagaagtgggtcctatagatttctctaccatagctatacaacatagtaaagatgcatcttataccaaggcccttaagttatttgaagataaagaacttcagtggaccttcataatgctgacctacctgaataacacactggtagaagattgtgtcaaagttcgatcagcagctgttacctgtttgaaaaacattttagccacaaagactggacatagtttctgggagatttataagatgacaacagatccaatgctggcctatctacagccttttagaacatcaagaaaaaagtttttagaagtacccagatttgacaaagaaaacccttttgaaggcctggatgatataaatctgtggattcctctaagtgaaaatcatgacatttggataaagacactgacttgtgcttttttggacagtggaggcacaaaatgtgaaattcttcaattattaaagccaatgtgtgaagtgaaaactgacttttgtcagactgtacttccatacttgattcatgatattttactccaagatacaaatgaatcatggagaaatctgctttctacacatgttcagggatttttcaccagctgtcttcgacacttctcgcaaacgagccgatccacaacccctgcaaacttggattcagagtcagagcactttttccgatgctgtttggataaaaaatcacaaagaacaatgcttgctgttgtggactacatgagaagacaaaagagaccttcttcaggaacaatttttaatgatgctttctggctggatttaaattatctagaagttgccaaggtagctcagtcttgtgctgctcactttacagctttactctatgcagaaatctatgcagataagaaaagtatggatgatcaagagaaaagaagtcttgcatttgaagaaggaagccagagtacaactatttctagcttgagtgaaaaaagtaaagaagaaactggaataagtttacaggatcttctcttagaaatctacagaagtataggggagccagatagtttgtatggctgtggtggagggaagatgttacaacccattactagactacgaacatatgaacacgaagcaatgtggggcaaagccctagtaacatatgacctcgaaacagcaatcccctcatcaacacgccaggcaggaatcattcaggccttgcagaatttgggactctgccatattctttccgtctatttaaaaggattggattatgaaaataaagactggtgtcctgaactagaagaacttcattaccaagcagcatggaggaatatgcagtgggaccattgcacttccgtcagcaaagaagtagaaggaaccagttaccatgaatcattgtacaatgctctacaatctctaagagacagagaattctctacattttatgaaagtctcaaatatgccagagtaaaagaagtggaagagatgtgtaagcgcagccttgagtctgtgtattcgctctatcccacacttagcaggttgcaggccattggagagctggaaagcattggggagcttttctcaagatcagtcacacatagacaactctctgaagtatatattaagtggcagaaacactcccagcttctcaaggacagtgattttagttttcaggagcctatcatggctctacgcacagtcattttggagatcctgatggaaaaggaaatggacaactcacaaagagaatgtattaaggacattctcaccaaacaccttgtagaactctctatactggccagaactttcaagaacactcagctccctgaaagggcaatatttcaaattaaacagtacaattcagttagctgtggagtctctgagtggcagctggaagaagcacaagtattctgggcaaaaaaggagcagagtcttgccctgagtattctcaagcaaatgatcaagaagttggatgccagctgtgcagcgaacaatcccagcctaaaacttacatacacagaatgtctgagggtttgtggcaactggttagcagaaacgtgcttagaaaatcctgcggtcatcatgcagacctatctagaaaaggcagtagaagttgctggaaattatgatggagaaagtagtgatgagctaagaaatggaaaaatgaaggcatttctctcattagcccggttttcagatactcaataccaaagaattgaaaactacatgaaatcatcggaatttgaaaacaagcaagctctcctgaaaagagccaaagaggaagtaggtctccttagggaacataaaattcagacaaacagatacacagtaaaggttcagcgagagctggagttggatgaattagccctgcgtgcactgaaagaggatcgtaaacgcttcttatgtaaagcagttgaaaattatatcaactgcttattaagtggagaagaacatgatatgtgggtattccgactttgttccctctggcttgaaaattctggagtttctgaagtcaatggcatgatgaagagagacggaatgaagattccaacatataaatttttgcctcttatgtaccaattggctgctagaatggggaccaagatgatgggaggcctaggatttcatgaagtcctcaataatctaatctctagaatttcaatggatcacccccatcacactttgtttattatactggccttagcaaatgcaaacagagatgaatttctgactaaaccagaggtagccagaagaagcagaataactaaaaatgtgcctaaacaaagctctcagcttgatgaggatcgaacagaggctgcaaatagaataatatgtactatcagaagtaggagacctcagatggtcagaagtgttgaggcactttgtgatgcttatattatattagcaaacttagatgccactcagtggaagactcagagaaaaggcataaatattccagcagaccagccaattactaaacttaagaatttagaagatgttgttgtccctactatggaaattaaggtggaccacacaggagaatatggaaatctggtgactatacagtcatttaaagcagaatttcgcttagcaggaggtgtaaatttaccaaaaataatagattgtgtaggttccgatggcaaggagaggagacagcttgttaagggccgtgatgacctgagacaagatgctgtcatgcaacaggtcttccagatgtgtaatacattactgcagagaaacacggaaactaggaagaggaaattaactatctgtacttataaggtggttcccctctctcagcgaagtggtgttcttgaatggtgcacaggaactgtccccattggtgaatttcttgttaacaatgaagatggtgctcataaaagatacaggccaaatgatttcagtgcctttcagtgccaaaagaaaatgatggaggtgcaaaaaaagtcttttgaagagaaatatgaagtcttcatggatgtttgccaaaattttcaaccagttttccgttacttctgcatggaaaaattcttggatccagctatttggtttgagaagcgattggcttatacgcgcagtgtagctacttcttctattgttggttacatacttggacttggtgatagacatgtacagaatatcttgataaatgagcagtcagcagaacttgtacatatagatctaggtgttgcttttgaacagggcaaaatccttcctactcctgagacagttccttttagactcaccagagatattgtggatggcatgggcattacgggtgttgaaggtgtcttcagaagatgctgtgagaaaaccatggaagtgatgagaaactctcaggaaactctgttaaccattgtagaggtccttctatatgatccactctttgactggaccatgaatcctttgaaagctttgtatttacagcagaggccggaagatgaaactgagcttcaccctactctgaatgcagatgaccaagaatgcaaacgaaatctcagtgatattgaccagagtttcaacaaagtagctgaacgtgtcttaatgagactacaagagaaactgaaaggagtggaagaaggcactgtgctcagtgttggtggacaagtgaatttgctcatacagcaggccatagaccccaaaaatctcagccgacttttcccaggatggaaagcttgggtgtgatcttcagtatatgaattaccctttcattcagcctttagaaattatattttagcctttatttttaacctgccaacatactttaagtagggattaatatttaagtgaactattgtgggtttttttgaatgttggttttaatacttgatttaatcaccactcaaaaatgttttgatggtcttaaggaacatctctgctttcactctttagaaataatggtcattcgggctgggcgcagcggctcacgcctgtaatcccagcactttgggaggccgaggtgagcggatcacaaggtcaggagttcgagaccagcctggccaagagaccagcctggccagtatggtgaaaccctgtctctactaaaaatacaaaaattagccgagcatggtggcgggcacctgtaatcccagctactcgagaggctgaggcaggagaatctcttgaacctgggaggtgaaggttgctgtgggccaaaatcatgccattgcactccagcctgggtgacaagagcgaaactccatctcaaaaaaaaaaaaaaaaaaacagaaacgtatttggatttttcctagtaagatcactcagtgttactaaataatgaagttgttatggagaacaaatttcaaagacacagttagtgtagttactatttttttaagtgtgtattaaaacttctcattctattctctttatcttttaagcccttctgtactgtccatgtatgttatctttctgtgataacttcatagattgccttctagttcatgaattctcttgtcagatgtatataatctcttttaccctatccattgggcttcttctttcagaaattgtttttcatttctaattatgcatcatttttcagatctctgtttcttgatgtcatttttaatgtttttttaatgttttttatgtcactaattattttaaatgtctgtacttgatagacactgtaatagttctattaaatttagttcctgctgtttatatctgttgatttttgtatttgataggctgttcatccagttttgtctttttgaaaagtgagtttattttcagcaaggctttatctatgggaatcttgagtgtctgtttatgtcatattcccagggctgttgctgcacacaagcccattcttattttaatttcttggctttagggtttccatacctgaagtgtagcataaatactgataggagatttcccaggccaaggcaaacacacttcctcctcatctccttgtgctagtgggcagaatatttgattgatgcctttttcactgagagtataagcttccatgtgtcccacctttatggcaggggtggaaggaggtacatttaattcccactgcctgcctttggcaagccctgggttctttgctccccatatagatgtctaagctaaaagccgtgggttaatgagactggcaaattgttccaggacagctacagcatcagctcacatattcacctctctggtttttcattcccctcatttttttctgagacagagtcttgctctgtcacccaggctggagtgcagtggcatgatctcagctcactgaaacctctgcctcctgggttcaagcaattctcctgcctcagcctcccgagtagctgggactacaggcgtgtgccaacacgcccggctaattttttgtatttttattagagacggagtttcaccgtgttagccaggatggtctcgatcgcttgacctcgtgatccaccctcctcggcctcccaaagtgctgggattacaggtgtgagccaccgcgcccggcctcattcccctcatttttgaccgtaaggatttcccctttcttgtaagttctgctatgtatttaaaagaatgttttctacattttatccagcatttctctgtgttctgttggaagggaagggcttaggtatctagtttgatacataggtagaagtggaacatttctctgtcccccagctgtcatcatataagataaacatcagataaaaagccacctgaaagtaaaactactgactcgtgtattagtgagtataatctcttctccatccttaggaaaatgttcatcccagctgcggagattaacaaatgggtgattgagctttctcctcgtatttggaccttgaaggttatataaatttttttcttatgaagagttggcatttctttttattgccaatggcaggcactcattcatatttgatctcctcaccttcccctcccctaaaaccaatctccagaactttttggactataaatttcttggtttgacttctggagaactgttcagaatattactttgcatttcaaattacaaacttaccttggtgtatctttttcttacaagctgcctaaatgaatatttggtatatattggtagttttattactatagtaaatcaaggaaatgcagtaaacttaaaatgtctttaagaaagccctgaaatcttcatgggtgaaattagaaattatcaactagataatagtatagataaatgaatttgtagctaattcttgctagttgttgcatccagagagctttgaataacatcattaatctactctttagccttgcatggtatgctatgaggctcctgttctgttcaagtattctaatcaatggctttgaaaagtttatcaaatttacatacagatcacaagcctaggagaaataactaattcacagatgacagaattaagattataaaagattttttttttgtaattttagtagagacagggttgccattgtattccagccttggcgacagagcaagactctgcctcaaaaaaaaaaaaaaaaaggttttggcaagctggaactctttctgcaaatgactaagatagaaaactgccaaggacaaatgaggagtagttagattttgaaaatattaatcatagaatagttgttgtatgctaagtcactgacccatattatgtacagcatttctgatctttactttgcaagattagtgatactatcccaatacactgctggagaaatcagaatttggagaaataagttgtccaaggcaagaagatagtaaattataagtacaagtgtaatatggacagtatctaacttgaaaagatttcaggcgaaaagaatctggggtttgccagtcagttgctcaaaaggtcaatgaaaaccaaatagtgaagctatcagagaagctaataaattatagactgcttgaacagttgtgtccagattaagggagataatagctttcccaccctactttgtgcaggtcatacctccccaaagtgtttacctaatcagtaggttcacaaactcttggtcattatagtatatgcctaaaatgtatgcacttaggaatgctaaaaatttaaatatggtctaaagcaaataaaagcaaagaggaaaaactttggacagcgtaaagactagaatagtcttttaaaaagaaagccagtatattggtttgaaatatagagatgtgtcccaatttcaagtattttaattgcaccttaatgaaattatctattttctatagattttagtactattgaatgtattactttactgttacctgaatttattataaagtgtttttgaataaataattctaaaagc

SEQ ID NO: 3 - DNA, 8258 bp, Homo sapiens
ttccgggaggagttttggcctccacacggctccgtcgggcgccgcgctcttccggcagcggtagctttggagacgccgggaacccgcgttggcgtggttgactagtgcctcgcagcctcagcatgggggaacatggcctggagctggcttccatgatccccgccctgcgggagctgggcagtgccacaccagaggaatataatacagttgtacagaagccaagacaaattctgtgtcaattcattgaccggatacttacagatgtaaatgttgttgctgtagaacttgtaaagaaaactgactctcagccaacctccgtgatgttgcttgatttcatccagcatatcatgaaatcctccccacttatgtttgtaaatgtgagtggaagccatgaggccaaaggcagttgtattgaattcagtaattggatcataacgagacttctgcggattgcagcaactccctcctgtcatttgttacacaagaaaatctgtgaagtcatctgttcattattatttctttttaaaagcaagagtcctgctatttttggggtactcacaaaagaattattacaactttttgaagacttggtttacctccatagaagaaatgtgatgggtcatgctgtggaatggccagtggtcatgagccgatttttaagtcaattagatgaacacatgggatatttacaatcagctcctttgcagttgatgagtatgcaaaatttagaatttattgaagtcactttattaatggttcttactcgtattattgcaattgtgttttttagaaggcaagaactcttactttggcagataggttgtgttctgctagagtatggtagtccaaaaattaaatccctagcaattagctttttaacagaactttttcagcttggaggactaccagcacaaccagctagcacttttttcagctcatttttggaattattaaaacaccttgtagaaatggatactgaccaattgaaactctatgaagagccattatcaaagctgataaagacactatttccctttgaagcagaagcttatagaaatattgaacctgtctatttaaatatgctgctggaaaaactctgtgtcatgtttgaagacggtgtgctcatgcggcttaagtctgatttgctaaaagcagctttgtgccatttactgcagtatttccttaaatttgtgccagctgggtatgaatctgctttacaagtcaggaaggtctatgtgagaaatatttgtaaagctcttttggatgtgcttggaattgaggtagatgcagagtacttgttgggcccactttatgcagctttgaaaatggaaagtatggaaatcattgaggagattcaatgccaaactcaacaggaaaacctcagcagtaatagtgatggaatatcacccaaaaggcgtcgtctcagctcgtctctaaacccttctaaaagagcaccaaaacagactgaggaaattaaacatgtggacatgaaccaaaagagcatattatggagtgcactgaaacagaaagctgaatcccttcagatttcccttgaatacagtggcctaaagaatcctgttattgagatgttagaaggaattgctgttgtcttacaactgactgctctgtgtactgttcattgttctcatcaaaacatgaactgccgtactttcaaggactgtcaacataaatccaagaagaaaccttctgtagtgataacttggatgtcattggatttttacacaaaagtgcttaagagctgtagaagtttgttagaatctgttcagaaactggacctggaggcaaccattgataaggtggtgaaaatttatgatgctttgatttatatgcaagtaaacagttcatttgaagatcatatcctggaagatttatgtggtatgctctcacttccatggatttattcccattctgatgatggctgtttaaagttgaccacatttgccgctaatcttctaacattaagctgtaggatttcagatagctattcaccacaggcacaatcacgatgtgtgtttcttctgactctgtttccaagaagaatattccttgagtggagaacagcagtttacaactgggccctgcagagctcccatgaagtaatccgggctagttgtgttagtggattttttatcttattgcagcagcagaattcttgtaacagagttcccaagattcttatagataaagtcaaagatgattctgacattgtcaagaaagaatttgcttctatacttggtcaacttgtctgtactcttcacggcatgttttatctgacaagttctttaacagaacctttctctgaacacggacatgtggacctcttctgtaggaacttgaaagccacttctcaacatgaatgttcatcttctcaactaaaagcttctgtctgcaagccattccttttcctactgaaaaaaaaaatacctagtccagtaaaacttgctttcatagataatctacatcatctttgtaagcatcttgattttagagaagatgaaacagatgtaaaagcagttcttggaactttattaaatttaatggaagatccagacaaagatgttagagtggcttttagtggaaatatcaagcacatattggaatccttggactctgaagatggatttataaaggagctttttgtcttaagaatgaaggaagcatatacacatgcccaaatatcaagaaataatgagctgaaggataccttgattcttacaacaggggatattggaagggccgcaaaaggagatttggtaccatttgcactcttacacttattgcattgtttgttatccaagtcagcatctgtctctggagcagcatacacagaaattagagctctggttgcagctaaaagtgttaaactgcaaagttttttcagccagtataagaaacccatctgtcagtttttggtagaatcccttcactctagtcagatgacagcacttccgaatactccatgccagaatgctgacgtgcgaaaacaagatgtggctcaccagagagaaatggctttaaatacgttgtctgaaattgccaacgttttcgactttcctgatcttaatcgttttcttactaggacattacaagttctactacctgatcttgctgccaaagcaagccctgcagcttctgctctcattcgaactttaggaaaacaattaaatgtcaatcgtagagagattttaataaacaacttcaaatatattttttctcatttggtctgttcttgttccaaagatgaattagaacgtgcccttcattatctgaagaatgaaacagaaattgaactggggagcctgttgagacaagatttccaaggattgcataatgaattattgctgcgtattggagaacactatcaacaggtttttaatggtttgtcaatacttgcctcatttgcatccagtgatgatccatatcagggcccgagagatatcatatcacctgaactgatggctgattatttacaacccaaattgttgggcattttggctttttttaacatgcagttactgagctctagtgttggcattgaagataagaaaatggccttgaacagtttgatgtctttgatgaagttaatgggacccaaacatgtcagttctgtgagggtgaagatgatgaccacactgagaactggccttcgattcaaggatgattttcctgaattgtgttgcagagcttgggactgctttgttcgctgcctggatcatgcttgtctgggctcccttctcagtcatgtaatagtagctttgttacctcttatacacatccagcctaaagaaactgcagctatcttccactacctcataattgaaaacagggatgctgtgcaagattttcttcatgaaatatattttttacctgatcatccagaattaaaaaagataaaagccgttctccaggaatacagaaaggagacctctgagagcactgatcttcagacaactcttcagctctctatgaaggccattcaacatgaaaatgtcgatgttcgtattcatgctcttacaagcttgaaggaaaccttgtataaaaatcaggaaaaactgataaagtatgcaacagacagtgaaacagtagaacctattatctcacagttggtgacagtgcttttgaaaggttgccaagatgcaaactctcaagctcggttgctctgtggggaatgtttaggggaattgggggcgatagatccaggtcgattagatttctcaacaactgaaactcaaggaaaagattttacatttgtgactggagtagaagattcaagctttgcctatggattattgatggagctaacaagagcttaccttgcgtatgctgataatagccgagctcaagattcagctgcctatgccattcaggagttgctttctatttatgactgtagagagatggagaccaacggcccaggtcaccaattgtggaggagatttcctgagcatgttcgggaaatactagaacctcatctaaataccagatacaagagttctcagaagtcaaccgattggtctggagtaaagaagccaatttacttaagtaaattgggtagtaactttgcagaatggtcagcatcttgggcaggttatcttattacaaaggttcgacatgatcttgccagtaaaattttcacctgctgtagcattatgatgaagcatgatttcaaagtgaccatctatcttcttccacatattctggtgtatgtcttactgggttgtaatcaagaagatcagcaggaggtttatgcagaaattatggcagttctaaagcatgacgatcagcataccataaatacccaagacattgcatctgatctgtgtcaactcagtacacagactgtgttctccatgcttgaccatctcacacagtgggcaaggcacaaatttcaggcactgaaagctgagaaatgtccacacagcaaatcaaacagaaataaggtagactcaatggtatctactgtggattatgaagactatcagagtgtaacccgttttctagacctcataccccaggatactctggcagtagcttcctttcgctccaaagcatacacacgagctgtaatgcactttgaatcatttattacagaaaagaagcaaaatattcaggaacatcttggatttttacagaaattgtatgctgctatgcatgaacctgatggagtggccggagtcagtgcaattagaaaggcagaaccatctctaaaagaacagatccttgaacatgaaagccttggcttgctgagggatgccactgcttgttatgacagggctattcagctagaaccagaccagatcattcattatcatggtgtagtaaagtccatgttaggtcttggtcagctgtctactgttatcactcaggtgaatggagtgcatgctaacaggtccgagtggacagatgaattaaacacgtacagagtggaagcagcttggaaattgtcacagtgggatttggtggaaaactatttggcagcagatggaaaatctacaacatggagtgtcagactgggacagctattattatcagccaaaaaaagagatatcacagctttttatgactcactgaaactagtgagagcagaacaaattgtacctctttcagctgcaagctttgaaagaggctcctaccaacgaggatatgaatatattgtgagattgcacatgttatgtgagttggagcatagcatcaaaccacttttccagcattctccaggtgacagttctcaagaagattctctaaactgggtagctcgactagaaatgacccagaattcctacagagccaaggagcctatcctggctctccggagggctttactaagcctcaacaaaagaccagattacaatgaaatggttggagaatgctggctgcagagtgccagggtagctagaaaggctggtcaccaccagacagcctacaatgctctccttaatgcaggggaatcacgactcgctgaactgtacgtggaaagggcaaagtggctctggtccaagggtgatgttcaccaggcactaattgttcttcaaaaaggtgttgaattatgttttcctgaaaatgaaaccccacctgagggtaagaacatgttaatccatggtcgagctatgctactagtgggccgatttatggaagaaacagctaactttgaaagcaatgcaattatgaaaaaatataaggatgtgaccgcgtgcctgccagaatgggaggatgggcatttttaccttgccaagtactatgacaaattgatgcccatggtcacagacaacaaaatggaaaagcaaggtgatctcatccggtatatagttcttcattttggcagatctctacaatatggaaatcagttcatatatcagtcaatgccacgaatgttaactctatggcttgattatggtacaaaggcatatgaatgggaaaaagctggccgctccgatcgtgtacaaatgaggaatgatttgggtaaaataaacaaggttatcacagagcatacaaactatttagctccatatcaatttttgactgctttttcacaattgatctctcgaatttgtcattctcacgatgaagtttttgttgtcttgatggaaataatagccaaagtatttctagcctatcctcaacaagcaatgtggatgatgacagctgtgtcaaagtcatcttatcccatgcgtgtgaacagatgcaaggaaatcctcaataaagctattcatatgaaaaaatccttagagaagtttgttggagatgcaactcgcctaacagataagcttctagaattgtgcaataaaccggttgatggaagtagttccacattaagcatgagcactcattttaaaatgcttaaaaagctggtagaagaagcaacatttagtgaaatcctcattcctctacaatcagtcatgatacctacacttccatcaattctgggtacccatgctaaccatgctagccatgaaccatttcctggacattgggcctatattgcagggtttgatgatatggtggaaattcttgcttctcttcagaaaccaaagaagatttctttaaaaggctcagatggaaagttctacatcatgatgtgtaagccaaaagatgacctgagaaaggattgtagactaatggaattcaattccttgattaataagtgcttaagaaaagatgcagagtctcgtagaagagaacttcatattcgaacatatgcagttattccactaaatgatgaatgtgggattattgaatgggtgaacaacactgctggtttgagacctattctgaccaaactatataaagaaaagggagtgtatatgacaggaaaagaacttcgccagtgtatgctaccaaagtcagcagctttatctgaaaaactcaaagtattccgagaatttctcctgcccaggcatcctcctatttttcatgagtggtttctgagaacattccctgatcctacatcatggtacagtagtagatcagcttactgccgttccactgcagtaatgtcaatggttggttatattctggggcttggagaccgtcatggtgaaaatattctctttgattctttgactggtgaatgcgtacatgtagatttcaattgtcttttcaataagggagaaacctttgaagttccagaaattgtgccatttcgcctgactcataatatggttaatggaatgggtcctatgggaacagagggtctttttcgaagagcatgtgaagttacaatgaggctgatgcgtgatcagcgagagcctttaatgagtgtcttaaagacttttctacatgatcctcttgtggaatggagtaaaccagtgaaagggcattccaaagcgccactgaatgaaactggagaagttgtcaatgaaaaggccaagacccatgttcttgacattgagcagcgactacaaggtgtaatcaagactcgaaatagagtgacaggactgccgttatctattgaaggacatgtgcattaccttatacaggaagctactgatgaaaacttactatgccagatgtatcttggttggactccatatatgtgaaatgaaattatgtaaaagaatatgttaataatctaaaagtaatgcatttggtatgaatctgtggttgtatctgttcaattctaaagtacaacataaatttacgttctcagcaactgttatttctctctgatcattaattatatgtaaaataatatacattcagttattaagaaataaactgctttcttaatacaaaaaaaa

SEQ ID NO: 4 - DNA, 1224 bp, Homo sapiens
cggggcgggagatttgaaaagtccttggccagggcgcggcgtggcagattcagttgtttgcgggcggccgggagagtagcagtgccttggaccccaggctccatctggcctgagcaccctgccccagcgagtcctccggaaagagcctgtcaccccatctgcacttgtcctcatgagccgctccaatgtccagcccacagctgcccctggccagaaggtgatggagaatagcagtgggacacccgacatcttaacgcggcacttcacaattgatgactttgagattgggcgtcctctgggcaaaggcaagtttggaaacgtgtacttggctcgggagaagaaaagccatttcatcgtggcgctcaaggtcctcttcaagtcccagatagagaaggagggcgtggagcatcagctgcgcagagagatcgaaatccaggcccacctgcaccatcccaacatcctgcgtctctacaactatttttatgaccggaggaggatctacttgattctagagtatgccccccgcggggagctctacaaggagctgcagaagagctgcacatttgacgagcagcgaacagccacgatcatggaggagttggcagatgctctaatgtactgccatgggaagaaggtgattcacagagacataaagccagaaaatctgctcttagggctcaagggagagctgaagattgctgacttcggctggtctgtgcatgcgccctccctgaggaggaagacaatgtgtggcaccctggactacctgcccccagagatgattgaggggcgcatgcacaatgagaaggtggatctgtggtgcattggagtgctttgctatgagctgctggtggggaacccaccctttgagagtgcatcacacaacgagacctatcgccgcatcgtcaaggtggacctaaagttccccgcttccgtgcccatgggagcccaggacctcatctccaaactgctcaggcataacccctcggaacggctgcccctggcccaggtctcagcccacccttgggtccgggccaactctcggagggtgctgcctccctctgcccttcaatctgtcgcctgatggtccctgtcattcactcgggtgcgtgtgtttgtatgtctgtgtatgtataggggaaagaagggatccctaactgttcccttatctgttttctacctcctcctttgtttaataaaggctgaagctttttgtactcatga

SEQ ID NO: 5 - DNA, 5642 bp, Homo sapiens
cgcccgccgggcgctctcgcttcagtcagtcgggccgcgccgcgcctcagctctggttgatgataattagaagcatgctttccactgaacttcccgacaacatttgttatgcagaatgtctctgagtgagaactcggtttttgcctatgaatcttctgtgcatagcaccaatgttttactcagccttaatgaccagcggaagaaagatgtgctgtgcgatgtcaccatctttgtggagggacagcggttccgcgctcaccggtccgtgctggcggcatgcagcagttacttccactcaagaatcgtaggccaggctgatggagagctgaacattactcttccagaagaggtgacagttaaaggatttgaacctttaattcagtttgcctacactgctaaactgattttaagtaaagagaatgtggatgaagtgtgcaaatgtgtggagtttttaagtgtacataatattgaggaatcctgctttcagtttctgaaatttaagtttttggactccactgcagaccagcaagaatgcccaagaaaaaaatgcttttcatcacactgtcagaaaacagaccttaaactttcacttttggaccagagggatctagaaactgatgaagtggaggaatttctggaaaataaaaatgttcagactcctcagtgtaaactccgcaggtatcaaggaaatgcaaaagcctcacctcctctacaagacagtgccagtcagacatatgagtccatgtgcttagagaaggatgctgctctggccttgccttctttatgccccaaatacagaaaattccaaaaagcatttggaactgacagagtccgtactggggaatctagtgtcaaagacattcatgcttctgttcagccaaatgaaaggtctgaaaatgaatgcctgggaggagtcccggagtgtagagatttgcaggtgatgttaaaatgtgacgaaagtaaattagcaatggaacctgaagaaacgaagaaagatcctgcttctcagtgcccaactgaaaaatcagaagtgactcctttcccccacaattcttccatagaccctcatggactttattctttgtctcttttacacacatatgaccaatatggtgacttgaattttgctggtatgcaaaacacaacagtgttaacagaaaagcctttgtcaggtacagacgtccaagaaaaaacatttggtgaaagtcaggatttacctttgaaatccgacttgggcaccagggaagatagtagtgttgcatctagtgataggagtagtgtggagcgagaagtggcagaacacctagcaaaaggcttctggagtgacatttgcagcacggacactccttgccaaatgcagttatcacctgctgtggccaaagatggctcagaacagatctcacagaaacggtctgagtgtccgtggttaggtatcaggattagtgagagcccagaaccaggtcaaaggactttcacaacattaagttctgtcaactgcccttttataagtactctgagtactgaaggctgttcaagcaatttggaaattggaaacgatgattatgtttcagaaccccagcaagaaccttgcccatatgcttgtgtcattagcttgggagacgactctgagacggacaccgaaggagacagtgaatcctgttcagccagagaacaagaatgtgaggtaaaactgccattcaatgcacaacggataatttcactgtctcgaaatgattttcagtccttgttgaaaatgcacaagcttactccagaacagctggattgtatccatgatattcgaagaagaagtaaaaacagaattgctgcacagcgctgtcgcaagagaaaacttgactgtatacagaatcttgaatcagaaattgagaagctgcaaagtgaaaaggagagcttgttgaaggaaagagatcacattttgtcaactctgggtgagacaaagcagaacctaactggactttgccagaaagtttgtaaagaagcagctctgagtcaagaacaaatacagatactcgccaagtactcagctgcagattgcccactttcatttttaatttctgaaaaagataaaagtactcctgatggtgaactggcgttaccatcaattttcagtttatctgaccggcctccagcagtgctgcctccctgtgccagaggaaacagtgagcctggctacgcgcgagggcaggagtcccagcagatgtccacagccacctctgagcaagctgggcctgcggaacagtgtcgtcagagtggtgggatctcagatttctgtcagcagatgactgataaatgtactactgatgagtaaacttgcattcacttccttcaaaccatctaattttctcctgaagttttggcagcgtcttgaaagcctaatatgaccatctgttgctcaacaatactgtttttttcctttagtagtttaccataagggaatttcctttaagtcaaccatgatttctccttgatttctacaagagacaaagaaatgattttgcctcctggatatcagaaaaatccatgtgaaaatgtagtaaacctttaaaactcatgttttaaagaataataactctagtaataactcttcctgctattcagaataagtaggagaatgaaaactgcagcatatcagacagcaatttaacagcttgaaacatctacagatagttcctactaaaagaagtggcctgcagaagtttaataatttgacttttttctaatattttagtttgaaagaaaatttcttcccaagcaatgctaatagagttctattcttagaagcagggtgtcagctactgggaatatttttgtagagctgcattgtgaaaaaaagatggtcttacctgaatcttagggctttgttcttcggctcctaaaatcaggctttaagctacattgggaagatttagtaaataggcaagtggttggcctaagacgggggctgcttctcctcttcagtatggactctagaaagtctggctacatgaatagatttaagtgtcactttccctccctgccccccgcttcagtctctaccatatctggtcccatcatggacttcctatttcctggcatttttgtccctttggaagaagaaataggactcagaatacagtggcatgagtgattacactggcagcattatctcaggctccctagaatctggagagcttaccaacatgtaaagctgttcatttttccaccgtgggtcaccaatgccagaaaaccagacatcacggggaaagaatgttgcttactttttaccaggagtgcagttcatttttttcaccctgtttttgaagtcgtattattcacttgtaaaaatgattgtaacagataaaaaatgtatctgcagcaactctgcaggtttgtgaaataggatgaaactcaatctttttctattgtgggtttgcatttgaaaagcaggttgaatccttgctctcttctccaaatttggtgtggtataaagacacacaaatcattttaacttggacatttaaagatcagtcttagtgtttgttcagtcctgttacaaaatagataactgagcacctatcgcataacattttgcggtggcttttagccatgctggggttagatgtgtttgagagtcaaatgaaagctatggatcttctcagcaattaaaaaaaatgcatatattcacattcacagaaacattggcagaacccagttttaatggtacagaggagtagtttatagtgttgatttcaccaaaatcagagggctgaaagagacacttctatagactgcatcctgagcctagtgcagggcttgtctagctaatgtgggcagccaccacccactgtgtatgaacaagtctgaagcaagttggccttgcccttgagagtatatggggaccagtcttcatgtcttggagtaatttgtcaaatgttaccctttttgatcagggtgtagggggaggatattgctagtatattttcagtggtttgtatgttctctctgtcactgacttatttgtaagagaaaattagttggacttgtttattttctagtagcttttataagtacactcaagaatttgtcagggagaataattctgatagtgcatcccatactgcaaaagaatttgtgtgtgtgtgtgtgtgtgtgtgtgtgtgtgtgtatgtgtatgtatacatatatatctctccatataggtatttctttgatacttgtaattttaaatttcagcttcacgatataaaataatataagaacttctggtttacaaaatgtaaaatcttaagccaatggaacccttgatttcctacctcagtgtacacccaactattggttgtatcagtttgtgtatgtgcaaatgtcaaataatcttttgctttaattgctactgtacttgctttgaaagattacctactattttatgataaaatgtagttgtctccagagcttaaatataatttgtaaagcacttggtttaaatttctctctacctataaacagtttagcattaagggtttctattaatgacacagaattattggccaagtgtaatttcttaaaatttagcattactttaaatagccagcatgtaatacaagtaactacactacctcatatctacatgattttcaagttgtaatgcagatggacagataaaaaagattttacgtttgtcttttggccataagtgggaaagttttctgtatattgcatagcattacacatttatgcctattttaacattaacttctaaagaagttttttctaagaaaatgtttcaaggcaatattttttttgaggctgccgaagacaaatgacaggattatgagtatacagtgtatgccttttccttcatgcagaattttgaaatgttttcagtttgtatattgcatattcacatgatcattgttcactattttatgaactggccttctcaatgtttgatgattttttaaaagctgttatgttgaattcagtaaaataacattaccttattttttttcttattcaaattctggaactatagcaaataattcgttaaattgtcatattcaaaacaaatgtggatacagtcttggttctccatctgtaattttttttaacagtttgctatagcttactgcttaactaattttaaataaggaaataagtatgttagatgcagtagacgatacaggttgcatgtggacactcagtcacattaacaacttgggaaaaaaatggcaatgttacggtgaattctcaggtgaacttttttcagttataaaacatctattttgaatctgtaaatattttaaatgttttattaaggcatgtaataaactattctttgaaacttgttgggtagaatgaaaattaaagccataatggtagaagatggcatactgattataaaagaagcagaaaaacattgatttttttatatctttcataatataattttctaacaatgcaataaaaccactaaacttttgtgtccatattttactgagaccatgtttcattaaaagcatagtttcatagtatttaatttacatttctccctaatgttcttacccaaatgtacctgaactaaaaaatgttagatgttggtgataagttgacagttaaataaaattctctaaaattgcttctaattgaaa

SEQ ID NO: 6 - DNA, 5765 bp, Homo sapiens
ccccgcccctctggcggcccgccgtcccagacgcgggaagagcttggccggtttcgagtcgctggcctgcagcttccctgtggtttcccgaggcttccttgcttcccgctctgcgaggagcctttcatccgaaggcgggacgatgccggataatcggcagccgaggaaccggcagccgaggatccgctccgggaacgagcctcgttccgcgcccgccatggaaccggatggtcgcggtgcctgggcccacagtcgcgccgcgctcgaccgcctggagaagctgctgcgctgctcgcgttgtactaacattctgagagagcctgtgtgtttaggaggatgtgagcacatcttctgtagtaattgtgtaagtgactgcattggaactggatgtccagtgtgttacaccccggcctggatacaagacttgaagataaatagacaactggacagcatgattcaactttgtagtaagcttcgaaatttgctacatgacaatgagctgtcagatttgaaagaagataaacctaggaaaagtttgtttaatgatgcaggaaacaagaagaattcaattaaaatgtggtttagccctcgaagtaagaaagtcagatatgttgtgagtaaagcttcagtgcaaacccagcctgcaataaaaaaagatgcaagtgctcagcaagactcatatgaatttgtttccccaagtcctcctgcagatgtttctgagagggctaaaaaggcttctgcaagatctggaaaaaagcaaaaaaagaaaactttagctgaaatcaaccaaaaatggaatttagaggcagaaaaagaagatggtgaatttgactccaaagaggaatctaagcaaaagctggtatccttctgtagccaaccatctgttatctccagtcctcagataaatggtgaaatagacttactagcaagtggctccttgacagaatctgaatgttttggaagtttaactgaagtctctttaccattggctgagcaaatagagtctccagacactaagagcaggaatgaagtagtgactcctgagaaggtctgcaaaaattatcttacatctaagaaatctttgccattagaaaataatggaaaacgtggccatcacaatagactttccagtcccatttctaagagatgtagaaccagcattctgagcaccagtggagattttgttaagcaaacggtgccctcagaaaatataccattgcctgaatgttcttcaccaccttcatgcaaacgtaaagttggtggtacatcagggaggaaaaacagtaacatgtccgatgaattcattagtctttcaccaggtacaccaccttctacattaagtagttcaagttacaggcgagtgatgtctagtccctcagcaatgaagctgttgcccaatatggctgtgaaaagaaatcatagaggagagactttgctccatattgcttctattaagggcgacataccttctgttgaataccttttacaaaatggaagtgatccaaatgttaaagaccatgctggatggacaccattgcatgaagcttgcaatcatgggcacctgaaggtagtggaattattgctccagcataaggcattggtgaacaccaccgggtatcaaaatgactcaccacttcacgatgcagccaagaatgggcatgtggatatagtcaagctgttactttcctatggagcctccagaaatgctgttaatatatttggtctgcggcctgtcgattatacagatgatgaaagtatgaaatcgctattgctgctaccagagaagaatgaatcatcctcagctagccactgctcagtaatgaacactgggcagcgtagggatggacctcttgtacttataggcagtgggctgtcttcagaacaacagaaaatgctcagtgagcttgcagtaattcttaaggctaaaaaatatactgagtttgacagtacagtaactcatgttgttgttcctggtgatgcagttcaaagtaccttgaagtgtatgcttgggattctcaatggatgctggattctaaaatttgaatgggtaaaagcatgtctacgaagaaaagtatgtgaacaggaagaaaagtatgaaattcctgaaggtccacgcagaagcaggctcaacagagaacagctgttgccaaagctgtttgatggatgctacttctatttgtggggaaccttcaaacaccatccaaaggacaaccttattaagctcgtcactgcaggtgggggccagatcctcagtagaaagcccaagccagacagtgacgtgactcagaccatcaatacagtcgcataccatgcgagacccgattctgatcagcgcttctgcacacagtatatcatctatgaagatttgtgtaattatcacccagagagggttcggcagggcaaagtctggaaggctccttcgagctggtttatagactgtgtgatgtcctttgagttgcttcctcttgacagctgaatattataccagatgaacatttcaaattgaatttgcacggtttgtgagagcccagtcattgtactgtttttaatgttcacatttttacaaataggtagagtcattcatatttgtctttgaatcaaaaaaaaaaaaaaagtctaatgccagattaggaattcatgttatgtttaccatttagaagctgggattgcttttaaaggtttttctttttaaaattggcatgtttttgatttatcatgtctttctattcagattattgggtatcaaagattaatgaggacaccagaatcttggttaaatagacaagtggtatcattactgtttgagtcttttaatattctccatacctgccaccagtgaaaaaacttgccttttttttttttttttttttagtaaacagaatattatcaaacaatttattttggctttattgaaaaaagagtatttggtctaaatgtgccaccataggtgttaaattctcctatctgcaattgtctttatcctatattgtgttcatttcttttcttaataatttactttgttgtgtgtttctacactttcatccctgttttttatcttgtatatcatcaggaaattgtgatttaatcattaacattggtttttttgtgtgtgtggtaaaaatcaacactaggctcatggtacatatttttattctgtacatttgcttgtaactatcaatttgtaactctgtttatctactacatgtgtatatatacttagagcattttctctaacacattttaatgttagtattttttaaaaggtctgaccagtctagcaaattgtcagtccaacgtcattactttaaattaagaagcagtcttcttctggtaaaccttgttggtatttgtaaaataattttgaaggtcttaatttcttcctttgtaaaaggaaaaggttttttttaaagtttttaggttggcatggaggcagaagttggtgattacttgatttacaacagattttttccagatcatacaaaaggccatacagtaagtatagaagtaggtatggggagggcttactaatatcaaataggcaaggccttagtgagtgggcaggataccacctgagagtggccagatgtggggaggttactctgctctgggtgctctcattcatgaatcgacaaggatacattagattattttgaaacatttttttaagaagcagaattctttaataattccttcctagacattgaatatacttataaaattaaagacttggggaaggagacactgagagacttgccagtttggttcctcatgaacaaaagaggacagtttgataactaccagaatagaatatccctagttttaaaatagtgagaatctctgaagttcatcaacatcttaagatgcacttacttgaaagtttgagattctgtttatcatttgaaaacacattttgctttaattctttctttgacatgttgttttttcatatcaagaaatatatgaacaaaataataaccttttgaccctgaccttgctgggtgaattagctctgaaacactctctacaaccagtaatgcatttgtcccacatttcattctgatagaaaatgaacaccatagcaccaaacaaaaatccgaggcgttagataatgtctggattaaataatttaagactctctaggattttggttgtcattttttatttataacagactttaagtcactttctgttgcctcataggtcacattttagacaggtttgtgtctgttccttgcatctgaattcctgattgtaaagacacctatgaggtctcttagtttttgtcattcattttcttggtttatcacccctcccttctttttgttgtttttccctgactgttaagcagtttcatctttgcttttgttaaatatttgacagcagttagtttgtgttaagctcttgaaacttgtgattgtactttctgtgtagatatacatgtaattattttttatttttcaatcatagattcaagcttccttcttttttaccacaaatcattaaagttatttgtgtttccatatacctgtgtcttgtataaaattggcttattctgtgctgttgaatgaggctcaacatgacttggtgaggaagtctattaactaacaaaagcttatcttttttaacataatgctttttaattaattttgaataaaaatatttctaaagtgtactagatactttattaccttagattattccgaatacagtataactttgatagtttggaatagtcattaagaaacaattacacactgattgctttgtgtctctaaaagtgagaggctggtagcttttccacattctcatggctattttctagttctacttgaatttataactgtttccctttttccttgacagctgccactttgtagctatttttctgtctctgctaatactttaccatatctatctcaattgttttttcttttgacttgctgaaaaatagaaaccagatgggaagtatattagcattatgattgaaataagggtaaatgagcaatgtgtgaaggttttcactgacttcacctaaaagatagtttagctacttgaattttagtaaatagaatttttcctttatttcatcggtccccccacctttttttttttttgcacctgccttgtaaatttaatagttaagtgacctctgcctagaggatgatatttggggaggtttgatgtttcctgtgggaataagacgattcacaggtgagagtggggccacattagctgttattgtttccatgggtcagtgtggaaaatgcattaatcatattctaaacgttcatgggcctcattacagtcacaattgtctattctgtttcctaccctgaacacattaaaatggtaggaactaatgcttgtcttatttaattactaaaagccaccattttctttgatagattgagctacagattgtaaacttcatgtatttctttataagtcaacccttttcaaagatacgcacatcaaactgaatgaataaataaatattgagaagttgaaaaaaaaaaaaaaaaacagaaaaacattgatttttttatatctttcataatataattttctaacaatgcaataaaaccactaaacttttgtgtccatattttactgagaccatgtttcattaaaagcatagtttcatagtatttaatttacatttctccctaatgttcttacccaaatgtacctgaactaaaaaatgttagatgttggtgataagttgacagttaaataaaattctctaaaattgcttctaattgaaa

SEQ ID NO: 7 - DNA, 1461 bp, Homo sapiens
gcaggcgcagtgtgagcggcaacatggcgtccaggtctaagcggcgtgccgtggaaagtggggttccgcagccgccggatcccccagtccagcgcgacgaggaagaggaaaaagaagtcgaaaatgaggatgaagacgatgatgacagtgacaaggaaaaggatgaagaggacgaggtcattgacgaggaagtgaatattgaatttgaagcttattccctatcagataatgattatgacggaattaagaaattactgcagcagctttttctaaaggctcctgtgaacactgcagaactaacagatctcttaattcaacagaaccatattgggagtgtgattaagcaaacggatgtttcagaagacagcaatgatgatatggatgaagatgaggtttttggtttcataagccttttaaatttaactgaaagaaagggtacccagtgtgttgaacaaattcaagagttggttctacgcttctgtgagaagaactgtgaaaagagcatggttgaacagctggacaagtttttaaatgacaccaccaagcctgtgggccttctcctaagtgaaagattcattaatgtccctccacagatcgctctgcccatgtaccagcagcttcagaaagaactggcgggggcacacagaaccaataagccatgtgggaagtgctacttttaccttctgattagtaagacatttgtggaagcaggaaaaaacaattccaaaaagaaacctagcaacaaaaagaaagctgcgttaatgtttgcaaatgcagaggaagaatttttctatgaggagcagggaaaacctgaggtgcttggaggtccagacacaagaagaggattggaaccagttccgatacagcacaatggtggttcacgggggcaagtgacagccctggtttctctgaaggctggactaattcaatcaagatcaactctaagtgatttccagggaaccttcatgactgttggaattgctctgtcataataagtcagggatatttaggaggctcatagtctcctggagggataaaacatctcggcacctagtaatggtaaattagtcaatatttgttagtttcgtttgagatctcaaatgttaggattttctgaagtctcagtgtctttcagagtttgagataccttgttttcattttttctaatttttaatttaaaagtaataaagaatattttgtaatgattaggatgaaaattttatcgtcaattataagccaaaatttgctaaaattaaagtcagtatacttgaaacaagtttctagtaagttctctggggtaagatactaattactctgataaaggggctatcaaaaaaatccagtaaattgttcataagaagagatcagtttaagagtcaaacaatttgctttgctagtaccttagctaaagaaaaaatactattaaagatgactatcacctttaaaaaaaaaaaaaaaaaa

SEQ ID NO: 8 - DNA, 4555 bp, Homo sapiens
aatcggaataggcaagcttccggcgggaagtgagccagggcttggcgcggcggccgtggttgcggcgcgggaagtttggatcctggttccgtccgctaggagtctgcgtgcgaggattatggctgctgttcctcaaaataatctacaggagcaactagaacgtcactcagccagaacacttaataataaattaagtctttcaaaaccaaaattttcaggtttcacttttaaaaagaaaacatcttcagataacaatgtatctgtaactaatgtgtcagtagcaaaaacacctgtattaagaaataaagatgttaatgttaccgaagacttttccttcagtgaacctctacccaacaccacaaatcagcaaagggtcaaggacttctttaaaaatgctccagcaggacaggaaacacagagaggtggatcaaaatcattattgccagatttcttgcagactccgaaggaagttgtatgcactacccaaaacacaccaactgtaaagaaatcccgggatactgctctcaagaaattagaatttagttcttcaccagattctttaagtaccatcaatgattgggatgatatggatgactttgatacttctgagacttcaaaatcatttgttacaccaccccaaagtcactttgtaagagtaagcactgctcagaaatcaaaaaagggtaagagaaacttttttaaagcacagctttatacaacaaacacagtaaagactgatttgcctccaccctcctctgaaagcgagcaaatagatttgactgaggaacagaaggatgactcagaatggttaagcagcgatgtgatttgcatcgatgatggccccattgctgaagtgcatataaatgaagatgctcaggaaagtgactctctgaaaactcatttggaagatgaaagagataatagcgaaaagaagaagaatttggaagaagctgaattacattcaactgagaaagttccatgtattgaatttgatgatgatgattatgatacggattttgttccaccttctccagaagaaattatttctgcttcttcttcctcttcaaaatgccttagtacgttaaaggaccttgacacctctgacagaaaagaggatgttcttagcacatcaaaagatcttttgtcaaaacctgagaaaatgagtatgcaggagctgaatccagaaaccagcacagactgtgacgctagacagataagtttacagcagcagcttattcatgtgatggagcacatctgtaaattaattgatactattcctgatgataaactgaaacttttggattgtgggaacgaactgcttcagcagcggaacataagaaggaaacttctaacggaagtagattttaataaaagtgatgccagtcttcttggctcattgtggagatacaggcctgattcacttgatggccctatggagggtgattcctgccctacagggaattctatgaaggagttaaatttttcacaccttccctcaaattctgtttctcctggggactgtttactgactaccaccctaggaaagacaggattctctgccaccaggaagaatctttttgaaaggcctttattcaatacccatttacagaagtcctttgtaagtagcaactgggctgaaacaccaagactaggaaaaaaaaatgaaagctcttatttcccaggaaatgttctcacaagcactgctgtgaaagatcagaataaacatactgcttcaataaatgacttagaaagagaaacccaaccttcctatgatattgataattttgacatagatgactttgatgatgatgatgactgggaagacataatgcataatttagcagccagcaaatcttccacagctgcctatcaacccatcaaggaaggtcggccaattaaatcagtatcagaaagactttcctcagccaagacagactgtcttccagtgtcatctactgctcaaaatataaacttctcagagtcaattcagaattatactgacaagtcagcacaaaatttagcatccagaaatctgaaacatgagcgtttccaaagtcttagttttcctcatacaaaggaaatgatgaagatttttcataaaaaatttggcctgcataattttagaactaatcagctagaggcgatcaatgctgcactgcttggtgaagactgttttatcctgatgccgactggaggtggtaagagtttgtgttaccagctccctgcctgtgtttctcctggggtcactgttgtcatttctcccttgagatcacttatcgtagatcaagtccaaaagctgacttccttggatattccagctacatatctgacaggtgataagactgactcagaagctacaaatatttacctccagttatcaaaaaaagacccaatcataaaacttctatatgtcactccagaaaagatctgtgcaagtaacagactcatttctactctggagaatctctatgagaggaagctcttggcacgttttgttattgatgaagcacattgtgtcagtcagtggggacatgattttcgtcaagattacaaaagaatgaatatgcttcgccagaagtttccttctgttccggtgatggctcttacggccacagctaatcccagggtacagaaggacatcctgactcagctgaagattctcagacctcaggtgtttagcatgagctttaacagacataatctgaaatactatgtattaccgaaaaagcctaaaaaggtggcatttgattgcctagaatggatcagaaagcaccacccatatgattcagggataatttactgcctctccaggcgagaatgtgacaccatggctgacacgttacagagagatgggctcgctgctcttgcttaccatgctggcctcagtgattctgccagagatgaagtgcagcagaagtggattaatcaggatggctgtcaggttatctgtgctacaattgcatttggaatggggattgacaaaccggacgtgcgatttgtgattcatgcatctctccctaaatctgtggagggttactaccaagaatctggcagagctggaagagatggggaaatatctcactgcctgcttttctatacctatcatgatgtgaccagactgaaaagacttataatgatggaaaaagatggaaaccatcatacaagagaaactcacttcaataatttgtatagcatggtacattactgtgaaaatataacggaatgcaggagaatacagcttttggcctactttggtgaaaatggatttaatcctgatttttgtaagaaacacccagatgtttcttgtgataattgctgtaaaacaaaggattataaaacaagagatgtgactgacgatgtgaaaagtattgtaagatttgttcaagaacatagttcatcacaaggaatgagaaatataaaacatgtaggtccttctggaagatttactatgaatatgctggtcgacattttcttggggagtaagagtgcaaaaatccagtcaggtatatttggaaaaggatctgcttattcacgacacaatgccgaaagactttttaaaaagctgatacttgacaagattttggatgaagacttatatatcaatgccaatgaccaggcgatcgcttatgtgatgctcggaaataaagcccaaactgtactaaatggcaatttaaaggtagactttatggaaacagaaaattccagcagtgtgaaaaaacaaaaagcgttagtagcaaaagtgtctcagagggaagagatggttaaaaaatgtcttggagaacttacagaagtctgcaaatctctggggaaagtttttggtgtccattacttcaatatttttaataccgtcactctcaagaagcttgcagaatctttatcttctgatcctgaggttttgcttcaaattgatggtgttactgaagacaaactggaaaaatatggtgcggaagtgatttcagtattacagaaatactctgaatggacatcgccagctgaagacagttccccagggataagcctgtccagcagcagaggccccggaagaagtgccgctgaggagctcgacgaggaaatacccgtatcttcccactactttgcaagtaaaaccagaaatgaaaggaagaggaaaaagatgccagcctcccaaaggtctaagaggagaaaaactgcttccagtggttccaaggcaaagggggggtctgccacatgtagaaagatatcttccaaaacgaaatcctccagcatcattggatccagttcagcctcacatacttctcaagcgacatcaggagccaatagcaaattggggattatggctccaccgaagcctataaatagaccgtttcttaagccttcatatgcattctcataacaaccgaatctcaatgtacatagaccctctttcttgtttgtcagcatctgaccatctgtgactataaagctgttattcttgttataccatttgaagtttttactcgtctctattaatatttaaataaatgctggggggtgatagttcttctttttaaaataaacattttcttttgaataagca

SEQ ID NO: 9 - DNA, 11386 bp, Homo sapiens
gtggcgcgagcttctgaaactaggcggcagaggcggagccgctgtggcactgctgcgcctctgctgcgcctcgggtgtcttttgcggcggtgggtcgccgccgggagaagcgtgaggggacagatttgtgaccggcgcggtttttgtcagcttactccggccaaaaaagaactgcacctctggagcggacttatttaccaagcattggaggaatatcgtaggtaaaaatgcctattggatccaaagagaggccaacattttttgaaatttttaagacacgctgcaacaaagcagatttaggaccaataagtcttaattggtttgaagaactttcttcagaagctccaccctataattctgaacctgcagaagaatctgaacataaaaacaacaattacgaaccaaacctatttaaaactccacaaaggaaaccatcttataatcagctggcttcaactccaataatattcaaagagcaagggctgactctgccgctgtaccaatctcctgtaaaagaattagataaattcaaattagacttaggaaggaatgttcccaatagtagacataaaagtcttcgcacagtgaaaactaaaatggatcaagcagatgatgtttcctgtccacttctaaattcttgtcttagtgaaagtcctgttgttctacaatgtacacatgtaacaccacaaagagataagtcagtggtatgtgggagtttgtttcatacaccaaagtttgtgaagggtcgtcagacaccaaaacatatttctgaaagtctaggagctgaggtggatcctgatatgtcttggtcaagttctttagctacaccacccacccttagttctactgtgctcatagtcagaaatgaagaagcatctgaaactgtatttcctcatgatactactgctaatgtgaaaagctatttttccaatcatgatgaaagtctgaagaaaaatgatagatttatcgcttctgtgacagacagtgaaaacacaaatcaaagagaagctgcaagtcatggatttggaaaaacatcagggaattcatttaaagtaaatagctgcaaagaccacattggaaagtcaatgccaaatgtcctagaagatgaagtatatgaaacagttgtagatacctctgaagaagatagtttttcattatgtttttctaaatgtagaacaaaaaatctacaaaaagtaagaactagcaagactaggaaaaaaattttccatgaagcaaacgctgatgaatgtgaaaaatctaaaaaccaagtgaaagaaaaatactcatttgtatctgaagtggaaccaaatgatactgatccattagattcaaatgtagcaaatcagaagccctttgagagtggaagtgacaaaatctccaaggaagttgtaccgtctttggcctgtgaatggtctcaactaaccctttcaggtctaaatggagcccagatggagaaaatacccctattgcatatttcttcatgtgaccaaaatatttcagaaaaagacctattagacacagagaacaaaagaaagaaagattttcttacttcagagaattctttgccacgtatttctagcctaccaaaatcagagaagccattaaatgaggaaacagtggtaaataagagagatgaagagcagcatcttgaatctcatacagactgcattcttgcagtaaagcaggcaatatctggaacttctccagtggcttcttcatttcagggtatcaaaaagtctatattcagaataagagaatcacctaaagagactttcaatgcaagtttttcaggtcatatgactgatccaaactttaaaaaagaaactgaagcctctgaaagtggactggaaatacatactgtttgctcacagaaggaggactccttatgtccaaatttaattgataatggaagctggccagccaccaccacacagaattctgtagctttgaagaatgcaggtttaatatccactttgaaaaagaaaacaaataagtttatttatgctatacatgatgaaacatcttataaaggaaaaaaaataccgaaagaccaaaaatcagaactaattaactgttcagcccagtttgaagcaaatgcttttgaagcaccacttacatttgcaaatgctgattcaggtttattgcattcttctgtgaaaagaagctgttcacagaatgattctgaagaaccaactttgtccttaactagctcttttgggacaattctgaggaaatgttctagaaatgaaacatgttctaataatacagtaatctctcaggatcttgattataaagaagcaaaatgtaataaggaaaaactacagttatttattaccccagaagctgattctctgtcatgcctgcaggaaggacagtgtgaaaatgatccaaaaagcaaaaaagtttcagatataaaagaagaggtcttggctgcagcatgtcacccagtacaacattcaaaagtggaatacagtgatactgactttcaatcccagaaaagtcttttatatgatcatgaaaatgccagcactcttattttaactcctacttccaaggatgttctgtcaaacctagtcatgatttctagaggcaaagaatcatacaaaatgtcagacaagctcaaaggtaacaattatgaatctgatgttgaattaaccaaaaatattcccatggaaaagaatcaagatgtatgtgctttaaatgaaaattataaaaacgttgagctgttgccacctgaaaaatacatgagagtagcatcaccttcaagaaaggtacaattcaaccaaaacacaaatctaagagtaatccaaaaaaatcaagaagaaactacttcaatttcaaaaataactgtcaatccagactctgaagaacttttctcagacaatgagaataattttgtcttccaagtagctaatgaaaggaataatcttgctttaggaaatactaaggaacttcatgaaacagacttgacttgtgtaaacgaacccattttcaagaactctaccatggttttatatggagacacaggtgataaacaagcaacccaagtgtcaattaaaaaagatttggtttatgttcttgcagaggagaacaaaaatagtgtaaagcagcatataaaaatgactctaggtcaagatttaaaatcggacatctccttgaatatagataaaataccagaaaaaaataatgattacatgaacaaatgggcaggactcttaggtccaatttcaaatcacagttttggaggtagcttcagaacagcttcaaataaggaaatcaagctctctgaacataacattaagaagagcaaaatgttcttcaaagatattgaagaacaatatcctactagtttagcttgtgttgaaattgtaaataccttggcattagataatcaaaagaaactgagcaagcctcagtcaattaatactgtatctgcacatttacagagtagtgtagttgtttctgattgtaaaaatagtcatataacccctcagatgttattttccaagcaggattttaattcaaaccataatttaacacctagccaaaaggcagaaattacagaactttctactatattagaagaatcaggaagtcagtttgaatttactcagtttagaaaaccaagctacatattgcagaagagtacatttgaagtgcctgaaaaccagatgactatcttaaagaccacttctgaggaatgcagagatgctgatcttcatgtcataatgaatgccccatcgattggtcaggtagacagcagcaagcaatttgaaggtacagttgaaattaaacggaagtttgctggcctgttgaaaaatgactgtaacaaaagtgcttctggttatttaacagatgaaaatgaagtggggtttaggggcttttattctgctcatggcacaaaactgaatgtttctactgaagctctgcaaaaagctgtgaaactgtttagtgatattgagaatattagtgaggaaacttctgcagaggtacatccaataagtttatcttcaagtaaatgtcatgattctgttgtttcaatgtttaagatagaaaatcataatgataaaactgtaagtgaaaaaaataataaatgccaactgatattacaaaataatattgaaatgactactggcacttttgttgaagaaattactgaaaattacaagagaaatactgaaaatgaagataacaaatatactgctgccagtagaaattctcataacttagaatttgatggcagtgattcaagtaaaaatgatactgtttgtattcataaagatgaaacggacttgctatttactgatcagcacaacatatgtcttaaattatctggccagtttatgaaggagggaaacactcagattaaagaagatttgtcagatttaacttttttggaagttgcgaaagctcaagaagcatgtcatggtaatacttcaaataaagaacagttaactgctactaaaacggagcaaaatataaaagattttgagacttctgatacattttttcagactgcaagtgggaaaaatattagtgtcgccaaagagtcatttaataaaattgtaaatttctttgatcagaaaccagaagaattgcataacttttccttaaattctgaattacattctgacataagaaagaacaaaatggacattctaagttatgaggaaacagacatagttaaacacaaaatactgaaagaaagtgtcccagttggtactggaaatcaactagtgaccttccagggacaacccgaacgtgatgaaaagatcaaagaacctactctattgggttttcatacagctagcgggaaaaaagttaaaattgcaaaggaatctttggacaaagtgaaaaacctttttgatgaaaaagagcaaggtactagtgaaatcaccagttttagccatcaatgggcaaagaccctaaagtacagagaggcctgtaaagaccttgaattagcatgtgagaccattgagatcacagctgccccaaagtgtaaagaaatgcagaattctctcaataatgataaaaaccttgtttctattgagactgtggtgccacctaagctcttaagtgataatttatgtagacaaactgaaaatctcaaaacatcaaaaagtatctttttgaaagttaaagtacatgaaaatgtagaaaaagaaacagcaaaaagtcctgcaacttgttacacaaatcagtccccttattcagtcattgaaaattcagccttagctttttacacaagttgtagtagaaaaacttctgtgagtcagacttcattacttgaagcaaaaaaatggcttagagaaggaatatttgatggtcaaccagaaagaataaatactgcagattatgtaggaaattatttgtatgaaaataattcaaacagtactatagctgaaaatgacaaaaatcatctctccgaaaaacaagatacttatttaagtaacagtagcatgtctaacagctattcctaccattctgatgaggtatataatgattcaggatatctctcaaaaaataaacttgattctggtattgagccagtattgaagaatgttgaagatcaaaaaaacactagtttttccaaagtaatatccaatgtaaaagatgcaaatgcatacccacaaactgtaaatgaagatatttgcgttgaggaacttgtgactagctcttcaccctgcaaaaataaaaatgcagccattaaattgtccatatctaatagtaataattttgaggtagggccacctgcatttaggatagccagtggtaaaatcgtttgtgtttcacatgaaacaattaaaaaagtgaaagacatatttacagacagtttcagtaaagtaattaaggaaaacaacgagaataaatcaaaaatttgccaaacgaaaattatggcaggttgttacgaggcattggatgattcagaggatattcttcataactctctagataatgatgaatgtagcacgcattcacataaggtttttgctgacattcagagtgaagaaattttacaacataaccaaaatatgtctggattggagaaagtttctaaaatatcaccttgtgatgttagtttggaaacttcagatatatgtaaatgtagtatagggaagcttcataagtcagtctcatctgcaaatacttgtgggatttttagcacagcaagtggaaaatctgtccaggtatcagatgcttcattacaaaacgcaagacaagtgttttctgaaatagaagatagtaccaagcaagtcttttccaaagtattgtttaaaagtaacgaacattcagaccagctcacaagagaagaaaatactgctatacgtactccagaacatttaatatcccaaaaaggcttttcatataatgtggtaaattcatctgctttctctggatttagtacagcaagtggaaagcaagtttccattttagaaagttccttacacaaagttaagggagtgttagaggaatttgatttaatcagaactgagcatagtcttcactattcacctacgtctagacaaaatgtatcaaaaatacttcctcgtgttgataagagaaacccagagcactgtgtaaactcagaaatggaaaaaacctgcagtaaagaatttaaattatcaaataacttaaatgttgaaggtggttcttcagaaaataatcactctattaaagtttctccatatctctctcaatttcaacaagacaaacaacagttggtattaggaaccaaagtgtcacttgttgagaacattcatgttttgggaaaagaacaggcttcacctaaaaacgtaaaaatggaaattggtaaaactgaaactttttctgatgttcctgtgaaaacaaatatagaagtttgttctacttactccaaagattcagaaaactactttgaaacagaagcagtagaaattgctaaagcttttatggaagatgatgaactgacagattctaaactgccaagtcatgccacacattctctttttacatgtcccgaaaatgaggaaatggttttgtcaaattcaagaattggaaaaagaagaggagagccccttatcttagtgggagaaccctcaatcaaaagaaacttattaaatgaatttgacaggataatagaaaatcaagaaaaatccttaaaggcttcaaaaagcactccagatggcacaataaaagatcgaagattgtttatgcatcatgtttctttagagccgattacctgtgtaccctttcgcacaactaaggaacgtcaagagatacagaatccaaattttaccgcacctggtcaagaatttctgtctaaatctcatttgtatgaacatctgactttggaaaaatcttcaagcaatttagcagtttcaggacatccattttatcaagtttctgctacaagaaatgaaaaaatgagacacttgattactacaggcagaccaaccaaagtctttgttccaccttttaaaactaaatcacattttcacagagttgaacagtgtgttaggaatattaacttggaggaaaacagacaaaagcaaaacattgatggacatggctctgatgatagtaaaaataagattaatgacaatgagattcatcagtttaacaaaaacaactccaatcaagcagcagctgtaactttcacaaagtgtgaagaagaacctttagatttaattacaagtcttcagaatgccagagatatacaggatatgcgaattaagaagaaacaaaggcaacgcgtctttccacagccaggcagtctgtatcttgcaaaaacatccactctgcctcgaatctctctgaaagcagcagtaggaggccaagttccctctgcgtgttctcataaacagctgtatacgtatggcgtttctaaacattgcataaaaattaacagcaaaaatgcagagtcttttcagtttcacactgaagattattttggtaaggaaagtttatggactggaaaaggaatacagttggctgatggtggatggctcataccctccaatgatggaaaggctggaaaagaagaattttatagggctctgtgtgacactccaggtgtggatccaaagcttatttctagaatttgggtttataatcactatagatggatcatatggaaactggcagctatggaatgtgcctttcctaaggaatttgctaatagatgcctaagcccagaaagggtgcttcttcaactaaaatacagatatgatacggaaattgatagaagcagaagatcggctataaaaaagataatggaaagggatgacacagctgcaaaaacacttgttctctgtgtttctgacataatttcattgagcgcaaatatatctgaaacttctagcaataaaactagtagtgcagatacccaaaaagtggccattattgaacttacagatgggtggtatgctgttaaggcccagttagatcctcccctcttagctgtcttaaagaatggcagactgacagttggtcagaagattattcttcatggagcagaactggtgggctctcctgatgcctgtacacctcttgaagccccagaatctcttatgttaaagatttctgctaacagtactcggcctgctcgctggtataccaaacttggattctttcctgaccctagaccttttcctctgcccttatcatcgcttttcagtgatggaggaaatgttggttgtgttgatgtaattattcaaagagcataccctatacagtggatggagaagacatcatctggattatacatatttcgcaatgaaagagaggaagaaaaggaagcagcaaaatatgtggaggcccaacaaaagagactagaagccttattcactaaaattcaggaggaatttgaagaacatgaagaaaacacaacaaaaccatatttaccatcacgtgcactaacaagacagcaagttcgtgctttgcaagatggtgcagagctttatgaagcagtgaagaatgcagcagacccagcttaccttgagggttatttcagtgaagagcagttaagagccttgaataatcacaggcaaatgttgaatgataagaaacaagctcagatccagttggaaattaggaaggccatggaatctgctgaacaaaaggaacaaggtttatcaagggatgtcacaaccgtgtggaagttgcgtattgtaagctattcaaaaaaagaaaaagattcagttatactgagtatttggcgtccatcatcagatttatattctctgttaacagaaggaaagagatacagaatttatcatcttgcaacttcaaaatctaaaagtaaatctgaaagagctaacatacagttagcagcgacaaaaaaaactcagtatcaacaactaccggtttcagatgaaattttatttcagatttaccagccacgggagccccttcacttcagcaaatttttagatccagactttcagccatcttgttctgaggtggacctaataggatttgtcgtttctgttgtgaaaaaaacaggacttgcccctttcgtctatttgtcagacgaatgttacaatttactggcaataaagttttggatagaccttaatgaggacattattaagcctcatatgttaattgctgcaagcaacctccagtggcgaccagaatccaaatcaggccttcttactttatttgctggagatttttctgtgttttctgctagtccaaaagagggccactttcaagagacattcaacaaaatgaaaaatactgttgagaatattgacatactttgcaatgaagcagaaaacaagcttatgcatatactgcatgcaaatgatcccaagtggtccaccccaactaaagactgtacttcagggccgtacactgctcaaatcattcctggtacaggaaacaagcttctgatgtcttctcctaattgtgagatatattatcaaagtcctttatcactttgtatggccaaaaggaagtctgtttccacacctgtctcagcccagatgacttcaaagtcttgtaaaggggagaaagagattgatgaccaaaagaactgcaaaaagagaagagccttggatttcttgagtagactgcctttacctccacctgttagtcccatttgtacatttgtttctccggctgcacagaaggcatttcagccaccaaggagttgtggcaccaaatacgaaacacccataaagaaaaaagaactgaattctcctcagatgactccatttaaaaaattcaatgaaatttctcttttggaaagtaattcaatagctgacgaagaacttgcattgataaatacccaagctcttttgtctggttcaacaggagaaaaacaatttatatctgtcagtgaatccactaggactgctcccaccagttcagaagattatctcagactgaaacgacgttgtactacatctctgatcaaagaacaggagagttcccaggccagtacggaagaatgtgagaaaaataagcaggacacaattacaactaaaaaatatatctaagcatttgcaaaggcgacaataaattattgacgcttaacctttccagtttataagactggaatataatttcaaaccacacattagtacttatgttgcacaatgagaaaagaaattagtttcaaatttacctcagcgtttgtgtatcgggcaaaaatcgttttgcccgattccgtattggtatacttttgcttcagttgcatatcttaaaactaaatgtaatttattaactaatcaagaaaaacatctttggctgagctcggtggctcatgcctgtaatcccaacactttgagaagctgaggtgggaggagtgcttgaggccaggagttcaagaccagcctgggcaacatagggagacccccatctttacaaagaaaaaaaaaaggggaaaagaaaatcttttaaatctttggatttgatcactacaagtattattttacaagtgaaataaacataccattttcttttagattgtgtcattaaatggaatgaggtctcttagtacagttattttgatgcagataattccttttagtttagctactattttaggggattttttttagaggtaactcactatgaaatagttctccttaatgcaaatatgttggttctgctatagttccatcctgttcaaaagtcaggatgaatatgaagagtggtgtttccttttgagcaattcttcatccttaagtcagcatgattataagaaaaatagaaccctcagtgtaactctaattcctttttactattccagtgtgatctctgaaattaaattacttcaactaaaaattcaaatactttaaatcagaagatttcatagttaatttattttttttttcaacaaaatggtcatccaaactcaaacttgagaaaatatcttgctttcaaattggcactgatt

SEQ ID NO: 10 - DNA, 2877 bp, Homo sapiens
aggcctgggcggagcgcacagcgctgggcgctggggaggctgcgccgcagcacccggttggtcaggaccaagtgggcccgaggcggacgtgagaagggtcgggccaagatggcggtgcaggtggtgcaggcggtgcaggcggttcatctcgagtctgacgctttcctcgtttgtctcaaccacgctctgagcacagagaaggaggaagtaatggggctgtgcataggggagttgaacgatgatacaaggagtgactccaaatttgcatatactggaactgaaatgcgcacagttgctgaaaaggttgatgccgtcagaattgttcacattcattctgtcatcatcttacgacgttctgataagaggaaggaccgagtagaaatttctccagagcagctgtctgcagcttcaacagaggcagagaggttggctgaactgacaggccgccccatgagagttgtgggctggtatcattcccatcctcatataactgtttggccttcacatgttgatgttcgcacacaagccatgtaccagatgatggatcaaggctttgtaggacttattttttcctgtttcatagaagataagaacacaaagactggccgggtactctacacttgcttccaatccatacaggcccaaaagagttcagagtatgagagaatcgaaatcccaatccatattgtacctcatgtcactatcgggaaagtgtgccttgaatcagcagtagagctgcccaagatcctgtgccaggaggagcaggatgcgtataggaggatccacagccttacacatctggactcagtaaccaagatccataatggctcagtgtttaccaagaatctgtgcagtcagatgtcggcagtcagcgggcctctcctacagtggttggaggacagactggagcaaaaccaacagcatttgcaggaattacaacaagaaaaggaagagcttatgcaagaactttcttctctagaataaatcaggagacaaaatggggaaagatgaaaatatccagtgtaaagttacttaagctaaatcaatttcaaagaagaaaaacttggaggactcattttacctgacttcaagacttactataaagctatagtaatcaagatagatggtattggcagaggaacagacacatacgtcaatggaacagatgagagaacccagaaataaacccatataaatatgctcagctgattttgaaaaagtgaaaaagcaattcaatggaggaagaatagcctttctgacaaattatgctagagcaattagacacccatggcgaggagaaaaaagaacctctacttaaacctcacatcttatataaaatttaactcaaaatgtataacggacttaaatgtgatacataaaactagataactttgaaaaaagccacaggagaaaaatcttcaggatcttgggctaggtgacaagttcttggactttgccccgaaagcacatccataaaagacaaaatctgatatattggacttcttcaaaatttaaaaacttgtgatttaagaagaggaaaagataagctacagattgagatgaatttgcaaaccatatatctgatcaatttggaatatataaagtgtactaaaaactcaactgaagtcaggcatggtagctcatgcttgtaatctcaccactttgggaggccaagatgggaggagtgcttgaggttaggcgttccagaccagcctgggcaacatagtgagactcttgtctctacaaaaagtttttttaaaaaattaactgggcaccatgacacacaccagtagtcccagctactagggaggcaggaggatcacttgagcccaggagtttgaggctgcggtgagctgtgatcacaccaccacactccaacctgtgtaacagagtgaggcctcatctcaaaaaaaaaaaaaggccacaaaactcaacaataaaaacaaacagtccaattagaaaatgggcaaaagacatgaatagatgtttcactgaagaggatctatagatggcaagtaagcatatgaaaagctgttaaactccataagtcatcagggaatgcaaattgaaaccacagcgaggctatgacttacttatctcaatggctaaagaaaaaatagtgaaaataccaaatactgatgaggatacaaactggatattttatacattgctgacaggaatgtaaaatggtacagccactctgggaaagagtttatgaatttcttatcaagttaaacataattttttaatcaagttaaacataagacccagcagttgtgctcctggacattcattccagagaaatgaaaacctatattgtacttgtactcaaatattcataggagctttatttgtaatagccccaaactggaaacaacccagatgtcctacaacaggtacatggttaaacaaaccatccataacttggaatactgctctggaatgaaaaggaactaactgttgatacaagaacttggttgtacctcaggggtattatggtgaacaaaaaaaaaaccagtctcaaatggtcacatactgtatgatcgcatttatataacattcttgaggtgacaaaattattgaaatgaagaacagattaatggttgccagggatagggactggagggggtgtggggtatgtatgactataaagggatgacgcaaggagttcctttgtgctgatggaacagttctatatgattatgatgattacgatgttgattataacatttgattatgaggttaagcacatgagtctttacctgtgctgaagttgtatggacctacatacacacaaatgaatgcatgtaaaatctggtgatactgaataaagtctgtggtctagatagcagtaaaaaaaaaaaaaaaaaaaaaaaa

SEQ ID NO: 11 - DNA, 1776 bp, Homo sapiens
ggaactgtcaggcaccgcggggacgcctttccgagcgcccggctcggcgcggcgcgggggcgcgcacgccgcccagcttcggggccgcagagggggcggggcgggacgtccggggagtgcgcacgcatcctgcccgcggcgcgcgcgcaggtcggtgcgtctgtcgggggcgcgctcgggtacctgtaccccacgtagtcgccggttaccgatcggactaagttccagtggtgatttacaagtcaagttaaaatgtccccagaagtggccttgaaccgaatatctccaatgctctcccctttcatatctagcgtggtccggaatggaaaagtgggactggatgctacaaactgtttgaggataactgacttaaaatctggctgcacatcattgactcctgggcccaactgtgaccgatttaaactgcacataccatatgctggagagacattaaagtgggatatcattttcaatgcccaatacccagaactgcctcccgattttatctttggagaagatgctgaattcctgccagacccctcagctttgcagaatcttgcctcctggaatccttcaaatcctgaatgtctcttacttgtggtgaaggaacttgtgcaacaatatcaccaattccaatgtagccgcctccgggagagctcccgcctcatgtttgaataccagacattactggaggagccacagtatggagagaacatggaaatttatgctgggaaaaaaaacaactggactggtgaattttcagctcgtttccttttgaagctgcccgtagatttcagcaatatccccacataccttctcaaggatgtaaatgaagaccctggagaagatgtggccctcctctctgttagttttgaggacactgaagccacccaggtgtaccccaagctgtacttgtcacctcgaattgagcatgcacttggaggctcctcagctcttcatatcccagcttttccaggaggaggatgtctcattgattacgttcctcaagtatgccacctgctcaccaacaaggtgcagtacgtgattcaagggtatcacaaaagaagagagtatattgctgcttttctcagtcactttggcacaggtgtcgtggaatatgatgcagaaggctttacaaaactcactctgctgctgatgtggaaagatttttgttttcttgtacacattgacctgcctctgtttttccctcgagaccagccaactctcacatttcagtccgtttatcactttaccaacagtggacagctttactcccaggcccaaaaaaattatccgtacagccccagatgggatggaaatgaaatggccaaaagagcaaattccaggaggcagcatttgccaatggaaagctctaggaaacaccagtcttgagaggtggccagccagactgcctgtccacatgcgtgtcagcacatacagccgcttcctggaagccgcctggaatgtcttcacggcagcgttttgctcacacagcagcttttgcacgccccaggcagccccgactgctgaaatccaacttgagctggctggtggtccctggatcctagagcccttcacttcgggttactccctctttcttgcctctatttcttagttggaagaaataaactcacaaattatggtgcagtaattttccggggaaagtaaagcctcaggaatgcccacgcctttcttccaaagcctttgtctctgagacctcttaagttctaagattaaatgcccctcgctgttcttcctctgaaaaaaaaaaaaaaa

SEQ ID NO: 12 - DNA, 3749 bp, Homo sapiens
aggggcgtggccacgtcgaccgcgcgggaccgttaaatttgaaacttggcggctaggggtgtgggcttgaggtggccggtttgttagggagtcgtgtacgtgccttggtcgcttctgtagctccgagggcaggttgcggaagaaagcccaggcggtctgtggcccagaggaaaggcctgcagcaggacgaggacctgagccaggaatgcaggatggcggcggtgaagaaggaagggggtgctctgagtgaagccatgtccctggagggagatgaatgggaactgagtaaagaaaatgtacaacctttaaggcaagggcggatcatgtccacgcttcagggagcactggcacaagaatctgcctgtaacaatactcttcagcagcagaaacgggcatttgaatatgaaattcgattttacactggaaatgaccctctggatgtttgggataggtatatcagctggacagagcagaactatcctcaaggtgggaaggagagtaatatgtcaacgttattagaaagagctgtagaagcactacaaggagaaaaacgatattatagtgatcctcgatttctcaatctctggcttaaattagggcgtttatgcaatgagcctttggatatgtacagttacttgcacaaccaagggattggtgtttcacttgctcagttctatatctcatgggcagaagaatatgaagctagagaaaactttaggaaagcagatgcgatatttcaggaagggattcaacagaaggctgaaccactagaaagactacagtcccagcaccgacaattccaagctcgagtgtctcggcaaactctgttggcacttgagaaagaagaagaggaggaagtttttgagtcttctgtaccacaacgaagcacactagctgaactaaagagcaaagggaaaaagacagcaagagctccaatcatccgtgtaggaggtgctctcaaggctccaagccagaacagaggactccaaaatccatttcctcaacagatgcaaaataatagtagaattactgtttttgatgaaaatgctgatgaggcttctacagcagagttgtctaagcctacagtccagccatggatagcaccccccatgcccagggccaaagagaatgagctgcaagcaggcccttggaacacaggcaggtccttggaacacaggcctcgtggcaatacagcttcactgatagctgtacccgctgtgcttcccagtttcactccatatgtggaagagactgcacaacagccagttatgacaccatgtaaaattgaacctagtataaaccacatcctaagcaccagaaagcctggaaaggaagaaggagatcctctacaaagggttcagagccatcagcaagcgtctgaggagaagaaagagaagatgatgtattgtaaggagaagatttatgcaggagtaggggaattctcctttgaagaaattcgggctgaagttttccggaagaaattaaaagagcaaagggaagccgagctattgaccagtgcagagaagagagcagaaatgcagaaacagattgaagagatggagaagaagctaaaagaaatccaaactactcagcaagaaagaacaggtgatcagcaagaagagacgatgcctacaaaggagacaactaaactgcaaattgcttccgagtctcagaaaataccaggaatgactctatccagttctgtttgtcaagtaaactgttgtgccagagaaacttcacttgcggagaacatttggcaggaacaacctcattctaaaggtcccagtgtacctttctccatttttgatgagtttcttctttcagaaaagaagaataaaagtcctcctgcagatcccccacgagttttagctcaacgaagaccccttgcagttctcaaaacctcagaaagcatcacctcaaatgaagatgtgtctccagatgtttgtgatgaatttacaggaattgaacccttgagcgaggatgccattatcacaggcttcagaaatgtaacaatttgtcctaacccagaagacacttgtgactttgccagagcagctcgttttgtatccactccttttcatgagataatgtccttgaaggatctcccttctgatcctgagagactgttaccggaagaagatctagatgtaaagacctctgaggaccagcagacagcttgtggcactatctacagtcagactctcagcatcaagaagctgagcccaattattgaagacagtcgtgaagccacacactcctctggcttctctggttcttctgcctcggttgcaagcacctcctccatcaaatgtcttcaaattcctgagaaactagaacttactaatgagacttcagaaaaccctactcagtcaccatggtgttcacagtatcgcagacagctactgaagtccctaccagagttaagtgcctctgcagagttgtgtatagaagacagaccaatgcctaagttggaaattgagaaggaaattgaattaggtaatgaggattactgcattaaacgagaatacctaatatgtgaagattacaagttattctgggtggcgccaagaaactctgcagaattaacagtaataaaggtatcttctcaacctgtcccatgggacttttatatcaacctcaagttaaaggaacgtttaaatgaagattttgatcatttttgcagctgttatcaatatcaagatggctgtattgtttggcaccaatatataaactgcttcacccttcaggatcttctccaacacagtgaatatattacccatgaaataacagtgttgattatttataaccttttgacaatagtggagatgctacacaaagcagaaatagtccatggtgacttgagtccaaggtgtctgattctcagaaacagaatccacgatccctatgattgtaacaagaacaatcaagctttgaagatagtggacttttcctacagtgttgaccttagggtgcagctggatgtttttaccctcagcggctttcggactgtacagatcctggaaggacaaaagatcctggctaactgttcttctccctaccaggtagacctgtttggtatagcagatttagcacatttactattgttcaaggaacacctacaggtcttctgggatgggtccttctggaaacttagccaaaatatttctgagctaaaagatggtgaattgtggaataaattctttgtgcggattctgaatgccaatgatgaggccacagtgtctgttcttggggagcttgcagcagaaatgaatggggtttttgacactacattccaaagtcacctgaacaaagccttatggaaggtagggaagttaactagtcctggggctttgctctttcagtgagctaggcaatcaagtctcacagattgctgcctcagagcaatggttgtattgtggaacactgaaactgtatgtgctgtaatttaatttaggacacatttagatgcactaccattgctgttctactttttggtacaggtatattttgacgtcactgatattttttatacagtgatatacttactcatggccttgtctaacttttgtgaagaactattttattctaaacagactcattacaaatggttaccttgttatttaacccatttgtctctacttttccctgtacttttcccatttgtaatttgtaaaatgttctcttatgatcaccatgtattttgtaaataataaaatagtatctgttaaatttgtgcttctaaaaaaaaa

SEQ ID NO: 13 - DNA, 5518 bp, Homo sapiens
gtcgccatcttgccccttcagaggcaccgcaaacaaacccaattcctggtgtcccctagtcttggcggaggagccttttagatgagccccgaaaggccgggcagggaggacaagctctttggggctaccaaacagaagcagcaatgcctgttgtgtggccaacccttctggatctcagcagggatgaatgcaaaagaattcttcgaaaattggaattggaggcatatgctggagttatcagtgcacttcgggcacagggggatctcaccaaggaaaagaaagatcttcttggagaactatcaaaagttcttagcatctcaacagaacgccaccgtgctgaagttcggagagcagtaaacgatgaacggttaacaacaattgcacataatatgtctggacctaatagctcttcagaatggtccattgaaggtcgtcgattggtaccactgatgccccggctcgttccccaaaccgcctttactgtaacagctaatgctgttgctaatgcagctatccagcataatgcatctcttccagtgcctgcagaaacaggaagcaaggaagtggtttgctattcctacacaagtaccacgtcaaccccaacctctacccctgttccaagtggcagcatagcaacggttaagtctccaagacctgccagtcctgcctccaatgtagttgtcttgccaagtggaagtactgtttatgtcaaaagtgtaagctgttcagatgaagatgaaaaacccagaaaacgaaggcgaacaaactcttccagctcctctcctgttgttctaaaggaagttccaaaggccgttgttccagtctcaaagacgatcactgtgcctgtgagtggtagtcccaagatgagcaacatcatgcagagcattgccaactccttaccaccccacatgtctcctgtaaaaataaccttcactaaaccatcaacacagacaacaaacacaacaacacagaaggttattatagtcaccacatcaccaagctcaaccttcgtgcccaacattctctccaaatcccataactatgcagcagtcactaagcttgtaccaacgtcagtcattgcttctacaacccagaagccaccagttgttataactgcttcacagtcctctctggtcagtaatagcagcagtggcagcagcagttctacaccatcacctattcctaatacagttgcagtaacagctgtggtgtcctctacaccatctgtggtcatgtcaacagtagcacaaggtgtatctacatcagcaatcaaaatggcatcaaccagacttccttcccccaaaagcttagtgagtgccccaactcagattcttgcacagttccctaaacaacatcaacagtctcctaagcagcagttatatcaagtgcaacagcagacacagcaacaagtggcccagccttctccagtatctcatcagcaacagcctcagcagtctcctttgccacctggtattaaacctaccatccaaatcaaacaggagtcaggtgttaaaatcatcacacaacaggttcaaccaagtaaaatcttacccaaaccagtgacagcaactctacccaccagtagcaattcccctattatggtggttagcagtaatggtgcaattatgacaactaaactggtaaccactcctactggcacacaagcaacctatacccggccaacagtgagcccatccattggtcggatggctgcaacccctggagctgcaacctatgtgaaaactacgagtggtagcatcattacagtagtacccaaatcattagctaccttggggggcaagataattagcagtaatatagtttctggaacgactaccaaaatcactacaatcccaatgacttccaagcccaacgtgattgttgtacaaaagactacaggaaaaggaacgaccattcaaggcctcccgggcaaaaatgttgtcacaacgttgctaaatgctggaggagaaaagactattcagacagtgccaacaggagcaaagccagctatccttactgctacaagacccatcaccaaaatgattgtaacgcagccaaaaggaataggttctacagttcaaccagcagctaaaatcatcccaacaaaaattgtttatgggcagcaagggaaaacgcaggttcttattaaacccaaaccagtgacttttcaagcgacagttgttagtgaacaaacaagacagctagtaacagaaacattacagcaagcatccagggtagcagaggctggtaattcatctattcaggaaggaaaagaagaaccacagaattatacagatagtagttcctcttctacagagtcctcccagagttcccaagattcccagcctgtagttcatgtaattgcttcccggcgtcaggattggtcagaacatgagattgcaatggagactagccctaccataatttatcaggatgtatccagtgaatcacaatcagctacttcaacaatcaaagctctgttagaactccaacagacaacagtaaaggaaaaattggaatctaaaccaagacaacccactattgacctgagtcaaatggcagtgcctattcagatgacccaggaaaagagacattctcctgagagtccatcaattgctgtggtagagtcagaactagtagctgaatacatcactactgaacgcactgatgaggggacagaggttgcttttccccttctagtcagccatcgctcccagccccaacagccttcccagccccagcggaccctgctccagcatgtggctcagtcacagaccgcaacacagacttcggtggtggtgaagtccatcccagcatcttcccctggagcaatcacccacattatgcagcaggcattaagcagtcacactgcttttaccaaacacagcgaggaacttggaactgaggagggcgaggttgaagagatggacactttagaccctcagacaggtctgttttaccgatctgccctgactcagtcacagtcagctaaacagcagaaacttagccagcccccgctggaacagactcagctgcaagtgaaaactctgcagtgcttccagactaaacagaagcagaccatccacctgcaggcagaccagctccagcacaaactcccgcaaatgccccagctttccatcaggcatcaaaaactcacccctctccagcaagaacaagcacagcccaagccagatgtacagcacacacagcatcccatggtggccaaagacaggcagcttcctaccttaatggcacagcccccgcaaactgtagtacaggtgcttgcagtgaaaaccacgcagcagctccctaaactgcagcaggctccgaaccaaccaaaaatctacgtgcaaccccaaaccccccagagccaaatgtcgctcccagcttcttcagagaaacagacggcaagccaggtggagcagccaattataacccaaggatcctctgttacaaagataacttttgaggggcgccagcctcccacagttacaaagataactggtggcagttctgtgcctaagctgacatcaccagttacaagcatatctcccattcaggcctctgagaagacagcagtgtctgacattttgaaaatgtctttgatggaagctcagattgatacaaatgtagaacatatgatagtggatcccccaaagaaggctcttgccactagcatgctcactggtgaagcaggatcattaccctccacccacatggtggtggcagggatggcgaattccactccccagcaacagaaatgtagagagtcctgttcgagtccatccactgttggctcttccctaacgacaaggaaaattgatccaccagcagtgcctgcgacaggccagttcatgcgtattcagaatgtaggccaaaagaaagctgaagagagtccagcagaaattatcatccaggctattcctcagtatgctattccttgtcactccagctccaatgtggtggtggagcccagtgggcttcttgagctaaacaacttcactagtcaacagctggatgatgaggagacagcaatggagcaggacatagacagtagcacggaggatggaactgaacccagcccttctcagagctctgctgaacggtcctagtgtttggacacaatagtgcactttaaaacctgcttggttaccaagtgtccagggaaacccttgtattttgatgactaaaaagagcactttgcccgtacttaggctgtggaccctaaaacagcagtgtttcaacaagatgttgctgcaggagcagctttttaaaacaagataaaactcacaggggaatgtacttttttaaaaaaaaatgaaaaagaaaaaaaaagctgcacatttacagtgacttaagacctggtcttctttctctgttggatcatggccggtgaaacagttttgtcttgcagtggaaagagacttcctgtgaatgtttctcaactggtttctactgagcaaaataccatctaaaaggagaatgtgaatagttgtattttgaaatgatgtgtcaggaaaagttttttaaaaacttgtatgtttttgcaaatccctggaagtgttgaattggttaaaattttacattttctcagttcataattagtttataaacacctagaataatactggcattaaagaatccttgttggatggtagaaatcagatccctaaccagtgggaggtactttttgggtggcttgtgcattcttatcagttgtgtgctaatttattgtattgttcctttgtgctctaagcagcacacttgccttctatttatttaagtgtaaacatttcaaagcaggccgtactccttctgacaaatttcttgtaaaccaggattgcctacgctttccactgtcgtcgtctccccactttccctcttcctttaagaaaacttactaaaaaatgtttcattgcgaagcagaggaaaagaaacgttttcagacctaaaggaaatgtttggtcatgttaagaaaacaaattattcattcatatgatgctttcttaacgttgaaattgcacattcacattggactgagactttgaaaataacttttacatacttttgtttaagcccctttgaaatgtataaaaagttcatttacagttctaaatgtaatgtttttaagccttctatctttttaggacacagtttgtttaagcaatatgttttggtcttgtgatcactgtctgtcacaagtagagtgaaaggggtaagggggtgggagggtaagagttttgacaagttgtggcaaaggaaactatacttttcatttttaaaaatgtaaatagaaaagtttttaacggttttatatagatttcactataaataagcattttaagactgacaaatgttgaactgtacatacatttatcagcataactgcccagtttttttggtgctgaagtactgtaagtagaattcatcaacggtctcctaatttttgcatctacatctggggggaaaaagctgtgatactatagttaataaattcccactagagtgacaaaaaaaa

SEQ ID NO: 14 - DNA, 2811 bp, Homo sapiens
ccatttcaatagtcgcgggatacttgaactgcaagaacagccgccgctccggcgggctgctcgctgcatctctgggcgtctttggctcgccacgctgggcagtgcctgcctgcgcctttcgcaacctcctcggccctgcgtggtctcgagctgggtgagcgagcgggcgggctggtaggctggcctgggctgcgaccggcggctacgactattctttggccgggtcggtgcgagtggtcggctgggcagagtgcacgctgcttggcgccgcaggctgatcccgccgtccactcccgggagcagtgatgttgggcaactctgcgccggggcctgcgacccgcgaggcgggctcggcgctgctagcattgcagcagacggcgctccaagaggaccaggagaatatcaacccggaaaaggcagcgcccgtccaacaaccgcggacccgggccgcgctggcggtactgaagtccgggaacccgcggggtctagcgcagcagcagaggccgaagacgagacgggttgcaccccttaaggatcttcctgtaaatgatgagcatgtcaccgttcctccttggaaagcaaacagtaaacagcctgcgttcaccattcatgtggatgaagcagaaaaagaagctcagaagaagccagctgaatctcaaaaaatagagcgtgaagatgccctggcttttaattcagccattagtttacctggacccagaaaaccattggtccctcttgattatccaatggatggtagttttgagtcaccacatactatggacatgtcaattgtattagaagatgaaaagccagtgagtgttaatgaagtaccagactaccatgaggatattcacacataccttagggaaatggaggttaaatgtaaacctaaagtgggttacatgaagaaacagccagacatcactaacagtatgagagctatcctcgtggactggttagttgaagtaggagaagaatataaactacagaatgagaccctgcatttggctgtgaactacattgataggttcctgtcttccatgtcagtgctgagaggaaaacttcagcttgtgggcactgctgctatgctgttagcctcaaagtttgaagaaatataccccccagaagtagcagagtttgtgtacattacagatgatacctacaccaagaaacaagttctgagaatggagcatctagttttgaaagtccttacttttgacttagctgctccaacagtaaatcagtttcttacccaatactttctgcatcagcagcctgcaaactgcaaagttgaaagtttagcaatgtttttgggagaattaagtttgatagatgctgacccatacctcaagtatttgccatcagttattgctggagctgcctttcatttagcactctacacagtcacgggacaaagctggcctgaatcattaatacgaaagactggatataccctggaaagtcttaagccttgtctcatggaccttcaccagacctacctcaaagcaccacagcatgcacaacagtcaataagagaaaagtacaaaaattcaaagtatcatggtgtttctctcctcaacccaccagagacactaaatctgtaacaatgaaagactgcctttgttttctaagatgtaaatcactcaaagtatatggtgtacagtttttaacttaggttttaattttacaatcatttctgaatacagaagttgtggccaagtacaaattatggtatctattactttttaaatggttttaatttgtatatcttttgtatatgtatctgtcttagatatttggctaattttaagtggttttgttaaagtattaatgatgccagctgtcaggataataaattgatttggaaaactttgcaagtcaaatttaacttcttcaggattttgcttagtaaagaagtttacttggtttactatataatgggaagtgaaaagccttcctctaaaattaaagtaggtttaggaaaacagaccctcaaattctgacattcattttcctaagcaactggatcaatttgctgacttgggcataatctaatctaagcatatctgaatacagtattcagagatagatacagtagagattccccagactttttcgctctttgtaaaacctgtttgtttaggttttgcgaggtaaactcaacagaggttgggagtggaagagggtgggaagcttatatgcaaattaacagacgagaaatgctccagaaggtttattattttaaagcacattaaaaacaaaaaactatttttaaaatcctgctagattttataatggatttgtgaataaaaaatacccagggttctcagaatggaataaatatcccttttaatagttatatatacagatatacaactgttagctttaattggcagctctcttcttttttcttcttttcactggctttttacttggtgctttttcttgttttgcactggtggtctgtgttctgtgaataaagcaaagtaagaatttactaagagtatgttaagttttggattattgaaataagaggcatttcttagttttccagtaggatctaaaatgtgtcagctatgagtaagactggcatccaagaagtttatattatagatttaggtcctaatttttataaatcacaaggtaaaaaaatcacagaacagatggatctctaatgaaaaagggatgtctttttgtttatagtcatgtggcaagatgagagtaaaaccagagagcaaacctctataagtgttgagtatatgtatacatttgaaataaaccagaaatttgttaccttaaaaaaaaaaaaaa

SEQ ID NO: 15 - DNA, 2094 bp, Homo sapiens
aaagaaaggaaggctgggaactaagaagctattggttggtgatccctggaccaatcggaggagccgtgatttggcgggagtcttgaccgccgccgggctcttggtacctcagcgcgagcgccaggcgtccggccgccgtggctatgttcgtgtccgatttccgcaaagagttctacgaggtggtccagagccagagggtccttctcttcgtggcctcggacgtggatgctctgtgtgcgtgcaagatccttcaggccttgttccagtgtgaccacgtgcaatatacgctggttccagtttctgggtggcaagaacttgaaactgcatttcttgagcataaagaacagtttcattattttattctcataaactgtggagctaatgtagacctattggatattcttcaacctgatgaagacactatattctttgtgtgtgacacccataggccagtcaatgtcgtcaatgtatacaacgatacccagatcaaattactcattaaacaagatgatgaccttgaagttcccgcctatgaagacatcttcagggatgaagaggaggatgaagagcattcaggaaatgacagtgatgggtcagagccttctgagaagcgcacacggttagaagaggagatagtggagcaaaccatgcggaggaggcagcggcgagagtgggaggcccggagtggctctgggagtgaacctgtggccgctgcattggagaagagctccaggttgttcgccggtcccatgagtgacaggacagccccaaggtctcccagaagagacatcctctttgactacgagcagtatgaatatcatgggacatcgtcagccatggtgatgtttgagctggcttggatgctgtccaaggacctgaatgacatgctgtggtgggccatcgttggactaacagaccagtgggtgcaagacaagatcactcaaatgaaatacgtgactgatgttggtgtcctgcagcgccacgtttcccgccacaaccaccggaacgaggatgaggagaacacactctccgtggactgcacacggatctcctttgagtatgacctccgcctggtgctctaccagcactggtccctccatgacagcctgtgcaacaccagctataccgcagccaggttcaagctgtggtctgtgcatggacagaagcggctccaggagttccttgcagacatgggtcttcccctgaagcaggtgaagcagaagttccaggccatggacatctccttgaaggagaatttgcgggaaatgattgaagagtctgcaaataaatttgggatgaaggacatgcgcgtgcagactttcagcattcattttgggttcaagcacaagtttctggccagcgacgtggtctttgccaccatgtctttgatggagagccccgagaaggatggctcagggacagatcacttcatccaggctctggacagcctctccaggagtaacctggacaagctgtaccatggcctggaactcgccaagaagcagctgcgagccacccagcagaccattgccagctgcctttgcaccaacctcgtcatctcccaggggcctttcctgtactgctctctcatggagggcactccagatgtcatgctgttctctaggccggcatccctaagcctgctcagcaaacacctgctcaagtcctttgtgtgttcgacaaagaaccggcgctgcaaactgctgcccctggtgatggctgcccccctgagcatggagcatggcacagtgaccgtggtgggcatccccccagagaccgacagctcggacaggaagaacttttttgggagggcgtttgagaaggcagcggaaagcaccagctcccggatgctgcacaaccattttgacctctcagtaattgagctgaaagctgaggatcggagcaagtttctggacgcacttatttccctcctgtcctaggaatttgattcttccagaatgaccttcttatttatgtaactggctttcatttagattgtaagttatggacatgatttgagatgtagaagccattttttattaaataaaatgcttattttaggctccgtccccaaaaaaaaaaaaaaaaaaaaaa

SEQ ID NO: 16 - DNA, 1754 bp, Homo sapiens
agccgccctttcctctttctttcgcgctctagccacccgggaaggcctgcccagcgtagctgggctctgattggctgctttgaaagtctacgggctacccgattggtgaatccggggccctttagcgcggatctaccatacccattgactaactatggaagattataccaaaatagagaaaattggagaaggtacctatggagttgtgtataagggtagacacaaaactacaggtcaagtggtagccatgaaaaaaatcagactagaaagtgaagaggaaggggttcctagtactgcaattcgggaaatttctctattaaaggaacttcgtcatccaaatatagtcagtcttcaggatgtgcttatgcaggattccaggttatatctcatctttgagtttctttccatggatctgaagaaatacttggattctatccctcctggtcagtacatggattcttcacttgttaaggtaaaagcttaactaattttattaatatttatgcactgtggatataaagggactatatatagaagtccctgcattttgtgggaatatgcttggaaaaagtgttagaataagaaaaagtatttcatttttctccctcatggttagtttatacaggttagagatacccatgttattaccagatagtgtttctagtaagtaaaaattagtgcctgagataacatagaactggtaggtattgttggaagctagggtagtctggtctttctttggctgtcagatacatgtaaaacaaagtaatgaaagcctagggcagagtggtggttgtaggtgttttattccagttttgaacatgttttggtcaatttattgtagacatttattatatttcaggtaaattataaaattgtatagttttaagtactgaagtatataaaagtgtcttattcttgcaccagttctaccaaaccactctgcagaggtagcgctgttagttttatttgtaatcttacacttgtatgtatgttcactttgtatgtatataaagatttttttttttacacaaggtggacttatttgcatatgtatatatacatattttcccttttttgtgtaaaacattatcaagacgtagatctacctatgtctatttacatttttgatataattaaaccacttccatattgatgaacatttaaattattttccaacttggttattgttgctcttattaacagtactgcactgaatgtccttatagatatttatcttcgtatgcaactttataggataaatttttagaatgggaatgatggattgaagatgtttatttacattttgatagatattgccggttgccccctaaaaaacttgtagcaatttactcttaaatactcatggtgtgtaatacttattgttttagtacatcattgccaaaacttggttttatcaatctgttaactatgtgaaaaaggcatattaagattgttttaattttatatttcatgacaatttaacacttcatatttagctattataaaccgcctatattttcgttaggatacgttctttaacaatcttgcatgacttttggactttctgcttttatgtcttgcttaagtcttcctcactcaaagatcgaatgtattagaataatacatgtcagtatttttctggtagttttagtaagtcctgtcttccacacatactttttttgtcttaaattctgtattaagatttattttgacttaaaaactgggatacagattctgctttatctttttcc

SEQ ID NO: 17 - DNA, 2121 bp, Homo sapiens
aacgcgggaagcaggggcggggcctctggtggcggtcgggaactcggtgggaggcggcaacattgtttcaagttggccaaattgacaagagcgagaggtatactgcgttccatcccgacccggggccacggtactgggccctgtttccccctcctcggcccccgagagccagggtccgccttctgcagggttcccaggcccccgctccagggccgggctgacccgactcgctggcgcttcatggagaacttccaaaaggtggaaaagatcggagagggcacgtacggagttgtgtacaaagccagaaacaagttgacgggagaggtggtggcgcttaagaaaatccgcctggacacgctgctggatgtcattcacacagaaaataaactctacctggtttttgaatttctgcaccaagatctcaagaaattcatggatgcctctgctctcactggcattcctcttcccctcatcaagagctatctgttccagctgctccagggcctagctttctgccattctcatcgggtcctccaccgagaccttaaacctcagaatctgcttattaacacagagggggccatcaagctagcagactttggactagccagagcttttggagtccctgttcgtacttacacccatgaggtgactcgccgggccctattccctggagattctgagattgaccagctcttccggatctttcggactctggggaccccagatgaggtggtgtggccaggagttacttctatgcctgattacaagccaagtttccccaagtgggcccggcaagattttagtaaagttgtacctcccctggatgaagatggacggagcttgttatcgcaaatgctgcactacgaccctaacaagcggatttcggccaaggcagccctggctcaccctttcttccaggatgtgaccaagccagtaccccatcttcgactctgatagccttcttgaagcccccagccctaatctcaccctctcctccagtgtgggcttgaccaggcttggccttgggctatttggactcaggtgggccctctgaacttgccttaaacactcaccttctagtcttggccagccaactctgggaatacaggggtgaaaggggggaaccagtgaaaatgaaaggaagtttcagtattagatgcacttaagttagcctccaccaccctttcccccttctcttagttattgctgaagagggttggtataaaaataattttaaaaaagccttcctacacgttagatttgccgtaccaatctctgaatgccccataattattatttccagtgtttgggatgaccaggatcccaagcctcctgctgccacaatgtttataaaggccaaatgatagcgggggctaagttggtgcttttgagaaccaagtaaaacaaaaccactgggaggagtctattttaaagaattcggttgaaaaaatagatccaatcagtttataccctagttagtgttttgcctcacctaataggctgggagactgaagactcagcccgggtggggctgcagaaaaatgattggccccagtccccttgtttgtcccttctacaggcatgaggaatctgggaggccctgagacagggattgtgcttcattccaatctattgcttcaccatggccttatgaggcaggtgagagatgtttgaatttttctcttccttttagtattcttagttgttcagttgccaaggatccctgatcccattttcctctgacgtccacctcctaccccataggagttagaagttagggtttaggcatcattttgagaatgctgacactttttcagggctgtgattgagtgagggcatgggtaaaaatatttctttaaaagaaggatgaacaattatatttatatttcaggttatatccaatagtagagttggctttttttttttttttttggtcatagtgggtggatttgttgccatgtgcaccttggggttttgtaatgacagtgctaaaaaaaaaaagcattttttttttatgatttgtctctgtcacccttgtccttgagtgctcttgctattaacgttatttgtaatttagtttgtagctcattaaaaaaatgtgcctagttttatagttca

SEQ ID NO: 18 - DNA, 2020 bp, Homo sapiens
cacctcctgtccgcccctcagcgcatgggtggcggtcacgtgcccagaacgtccggcgttcgccccgccctcccagtttccgcgcgcctctttggcagctggtcacatggtgagggtgggggtgagggggcctctctagcttgcggcctgtgtctatggtcgggccctctgcgtccagctgctccggaccgagctcgggtgtatggggccgtaggaaccggctccggggccccgataacgggccgcccccacagcaccccgggctggcgtgagggtctcccttgatctgagaatggctacctctcgatatgagccagtggctgaaattggtgtcggtgcctatgggacagtgtacaaggcccgtgatccccacagtggccactttgtggccctcaagagtgtgagagtccccaatggaggaggaggtggaggaggccttcccatcagcacagttcgtgaggtggctttactgaggcgactggaggcttttgagcatcccaatgttgtccggctgatggacgtctgtgccacatcccgaactgaccgggagatcaaggtaaccctggtgtttgagcatgtagaccaggacctaaggacatatctggacaaggcacccccaccaggcttgccagccgaaacgatcaaggatctgatgcgccagtttctaagaggcctagatttccttcatgccaattgcatcgttcaccgagatctgaagccagagaacattctggtgacaagtggtggaacagtcaagctggctgactttggcctggccagaatctacagctaccagatggcacttacacccgtggttgttacactctggtaccgagctcccgaagttcttctgcagtccacatatgcaacacctgtggacatgtggagtgttggctgtatctttgcagagatgtttcgtcgaaagcctctcttctgtggaaactctgaagccgaccagttgggcaaaatctttgacctgattgggctgcctccagaggatgactggcctcgagatgtatccctgccccgtggagcctttccccccagagggccccgcccagtgcagtcggtggtacctgagatggaggagtcgggagcacagctgctgctggaaatgctgacttttaacccacacaagcgaatctctgcctttcgagctctgcagcactcttatctacataaggatgaaggtaatccggagtgagcaatggagtggctgccatggaaggaagaaaagctgccatttcccttctggacactgagagggcaatctttgcctttatctctgaggctatggagggtcctcctccatctttctacagagattactttgctgccttaatgacattcccctcccacctctccttttgaggcttctccttctccttcccatttctctacactaaggggtatgttccctcttgtccctttccctacctttatatttggggtccttttttatacaggaaaaacaaaacaaagaaataatggtcttttttttttttttaatgtttcttcctctgtttggctttgccattgtgcgatttggaaaaaccacttggaagaagggactttcctgcaaaaccttaaagactggttaaattacagggcctaggaagtcagtggagccccttgactgacaaagcttagaaaggaactgaaattgcttctttgaatatggattttaggcggggcgtggtggctcacgcctataatcccagcacgttgggaggccaacgcgggtggatcacctgaggtcaggagttcgagaccagcctgactaacatggtgaaaccctgtctctactaaaaatacaaaattagtcaggcgtggtggtgcacacctgtaatcccagctacttgggagactgaggcaggaggatcgcttgaacccgggaggcagaggttgcggtgagccgagatcatgccattgcactccagcctgggcaacagagcaagactctgtgtcaaaaaaaaaaaaagaatatagatttttaaatggcaaaaaaaaaaaaaaaaaa

SEQ ID NO: 19 - DNA, 2699 bp, Homo sapiens
cttttaaatttgcgttgtaagatttattttggctctccccgcctgttctttgcacattaaaaatgaaaaagtttgtagaactaagctaagcagatggtcttcctgcaaaaagaccgggctgaagtaaagcattgttttggagctggttcacagaaaaaaggcaaaactggttatcctgacttcaagctccaacataaactgctcgctttctccgggaaacttgccccgccacacacacttgactgcgtggccagttctttcgaagcctctcgctcccaacacggagttcctcccatttcttcacagtcggctctcagcagctgctgctggtttctcggctccagcaccacgagtaccgcactctgaggtttacaaagcactctgcttcaccgactgtgatcctcacagtcctgtccggtggcctcacgcaggtggcggtgcagcctttcaggcccagagcggccaggagcgaagcccgcagccccgcctggaagcgcagcgcggtcggtcgcgcgcccctgaggcttggaggcctgggcttcccccagcagcgctcgagcaccgcccagtcgagcctcacaccggatgccacttcatatttgggcccagagctcaattcgcgccgatgcggtccgccgtccttaaatctcttcagccaggatctctccccgactgcaaagcagccctgggcgggagcggcaacatctccacgtcacccttttggagccgccgacattcagaggggcaggacacgggaacgcgcgctgtcttgctttacggcgcgggtgcgcgagtttgcggcagcgtgacgccctcaagttttggcgggaaaagcgctgcatttggattcctgcagtggtgggcaaaggacagtccgccgaggtgctcggtggagtcatggcagtgccctttgtggaagactgggacttggtgcaaaccctgggagaaggtgcctatggagaagttcaacttgctgtgaatagagtaactgaagaagcagtcgcagtgaagattgtagatatgaagcgtgccgtagactgtccagaaaatattaagaaagagatctgtatcaataaaatgctaaatcatgaaaatgtagtaaaattctatggtcacaggagagaaggcaatatccaatatttatttctggagtactgtagtggaggagagctttttgacagaatagagccagacataggcatgcctgaaccagatgctcagagattcttccatcaactcatggcaggggtggtttatctgcatggtattggaataactcacagggatattaaaccagaaaatcttctgttggatgaaagggataacctcaaaatctcagactttggcttggcaacagtatttcggtataataatcgtgagcgtttgttgaacaagatgtgtggtactttaccatatgttgctccagaacttctgaagagaagagaatttcatgcagaaccagttgatgtttggtcctgtggaatagtacttactgcaatgctcgctggagaattgccatgggaccaacccagtgacagctgtcaggagtattctgactggaaagaaaaaaaaacatacctcaacccttggaaaaaaatcgattctgctcctctagctctgctgcataaaatcttagttgagaatccatcagcaagaattaccattccagacatcaaaaaagatagatggtacaacaaacccctcaagaaaggggcaaaaaggccccgagtcacttcaggtggtgtgtcagagtctcccagtggattttctaagcacattcaatccaatttggacttctctccagtaaacagtgcttctagtgaagaaaatgtgaagtactccagttctcagccagaaccccgcacaggtctttccttatgggataccagcccctcatacattgataaattggtacaagggatcagcttttcccagcccacatgtcctgatcatatgcttttgaatagtcagttacttggcaccccaggatcctcacagaacccctggcagcggttggtcaaaagaatgacacgattctttaccaaattggatgcagacaaatcttatcaatgcctgaaagagacttgtgagaagttgggctatcaatggaagaaaagttgtatgaatcaggttactatatcaacaactgataggagaaacaataaactcattttcaaagtgaatttgttagaaatggatgataaaatattggttgacttccggctttctaagggtgatggattggagttcaagagacacttcctgaagattaaagggaagctgattgatattgtgagcagccagaagatttggcttcctgccacatgatcggaccatcggctctggggaatcctgatggagtttcactcttgtctcccaggctggagtacaatggcatgatctcagcttactgcaacctccgtctcctgggttcaagcgattctcctgcctcagccttccaagtagctgggattacaggtgcccaccaccacacctggctaggttttgtatttttagtagagatggggttttttcatgttggccaggctgatctggaactcctgacctcaagtgatccacctgccttggcctcccaaagtgctgggattttaggtgtgagccacctcgcctggcaagggattctgttcttagtccttgaaaaaataaagttctgaatcttcaaaaaaaaaaaaaaaaaa

SEQ ID NO: 20 - DNA, 1991 bp, Homo sapiens
gcaggtttagcgccactctgctggctgaggctgcggagagtgtgcggctccaggtgggctcacgcggtcgtgatgtctcgggagtcggatgttgaggctcagcagtctcatggcagcagtgcctgttcacagccccatggcagcgttacccagtcccaaggctcctcctcacagtcccagggcatatccagctcctctaccagcacgatgccaaactccagccagtcctctcactccagctctgggacactgagctccttagagacagtgtccactcaggaactctattctattcctgaggaccaagaacctgaggaccaagaacctgaggagcctacccctgccccctgggctcgattatgggcccttcaggatggatttgccaatcttgagacagagtctggccatgttacccaatctgatcttgaactcctgctgtcatctgatcctcctgcctcagcctcccaaagtgctgggataagaggtgtgaggcaccatccccggccagtttgcagtctaaaatgtgtgaatgacaactactggtttgggagggacaaaagctgtgaatattgctttgatgaaccactgctgaaaagaacagataaataccgaacatacagcaagaaacactttcggattttcagggaagtgggtcctaaaaactcttacattgcatacatagaagatcacagtggcaatggaacctttgtaaatacagagcttgtagggaaaggaaaacgccgtcctttgaataacaattctgaaattgcactgtcactaagcagaaataaagtttttgtcttttttgatctgactgtagatgatcagtcagtttatcctaaggcattaagagatgaatacatcatgtcaaaaactcttggaagtggtgcctgtggagaggtaaagctggctttcgagaggaaaacatgtaagaaagtagccataaagatcatcagcaaaaggaagtttgctattggttcagcaagagaggcagacccagctctcaatgttgaaacagaaatagaaattttgaaaaagctaaatcatccttgcatcatcaagattaaaaacttttttgatgcagaagattattatattgttttggaattgatggaagggggagagctgtttgacaaagtggtggggaataaacgcctgaaagaagctacctgcaagctctatttttaccagatgctcttggctgtgcagtaccttcatgaaaacggtattatacaccgtgacttaaagccagagaatgttttactgtcatctcaagaagaggactgtcttataaagattactgattttgggcactccaagattttgggagagacctctctcatgagaaccttatgtggaacccccacctacttggcgcctgaagttcttgtttctgttgggactgctgggtataaccgtgctgtggactgctggagtttaggagttattctttttatctgccttagtgggtatccacctttctctgagcataggactcaagtgtcactgaaggatcagatcaccagtggaaaatacaacttcattcctgaagtctgggcagaagtctcagagaaagctctggaccttgtcaagaagttgttggtagtggatccaaaggcacgttttacgacagaagaagccttaagacacccgtggcttcaggatgaagacatgaagagaaagtttcaagatcttctgtctgaggaaaatgaatccacagctctaccccaggttctagcccagccttctactagtcgaaagcggccccgtgaaggggaagccgagggtgccgagaccacaaagcgcccagctgtgtgtgctgctgtgttgtgaactccgtggtttgaacacgaaagaaatgtaccttctttcactctgtcatctttcttttctttgagtctgtttttttatagtttgtattttaattatgggaataattgctttttcacagtcactgatgtacaattaaaaacctgatggaacctggaaaa

SEQ ID NO: 21 - DNA, 2082 bp, Homo sapiens
ctcatctttccaagctaaatgcttctcttactgtccttctagtccttgttgactttgaaatgaaatcagaggcccctggacaaaggactacttcttacataatatttcttattttcccagaagtgattatttttctgttgcccacttttcaatatgaaggaggatcaagttgtggcggaagaaccaggattccaagatgaagaggaatctttgtttcaagatattgacctgttacagaaacatggaattaacgtggctgacattaagaaactgaaatcagtaggaatctgtaccatcaaaggtatacagatgacaacaagaagagctctatgcaatgtcaaaggactctcagaagccaaagtagacaagattaaagaggcagcgaacaaactaattgaaccaggattcttgactgcatttgagtatagtgaaaagaggaaaatggttttccatatcaccaccgggagccaggaatttgataagttactaggaggtggaattgaaagtatggcaattacagaagcttttggagaatttcgtactggaaaaacccagctttctcataccctctgtggtgaacatcagatggagctacttgattatgtagcagcaaagttccatgaagaagctggcatcttcaagctattgattatcgattcaataatggcactttttcgagtggatttcagtggccgtggggagttggccgaacggcagcaaaaattggcccagatgttgtcacgactccaaaaaatctcagaagaatataacgtggctgtttttgtgaccaatcaaatgactgccgatccaggagcaactatgacctttcaggcagatcccaaaaaacccattgggggacacattctggctcatgcttcaacaacaagaataagcttgcgaaagggaagaggagagctcagaattgccaagatttatgacagtcctgagatgcctgaaaatgaagccaccttcgcaataactgctggaggaattggggatgccaaggagtaggtggtgaattgatgcaaattgcttcttagtgcttattaggagctgaagaaatggaaaagcagtctccaatttcacatcttgaaatagaggttttttcccacatgttactaaagaaaagtcagcaaagagatttaaatcttatatttatcttaaaagtccctgatttatgataactatacattgtatgtaaattcagggatatgtatatgtatgtttgtgtgtgtgtgtgtttgtgtgtgtatacctgacatatatagtagatatatatacctattgaaattctctcactctgtgtatgtatatatacctatggaaaactagttgttgggaaaggagtacgtgattccctccctttcacttttcaaagtgagccactaaacagaaagtctaagagttcagaaatgtcccattctcctaaggactttcccttcaccatttttctagggtatagtgccactgacttacatagctagatgtttttccacaagaggatttaagggaggaatgtttataggacacacacacaaaagctctttctatttataatatcaaactgcatattcacctttatagcaacagaaaacagacattaaattaagccaaattttaaatcatttgactttgacaagcagaaattacttttaaaaaatgtatttatggctgggcgtggtggctcacacctgtaatcccagcactttgggaggccgaggcaggtggatcacttgaggtcaggagttcaagaccagcctggccaacatggagaaaccccatctctactaaaaatacaaaaattagccaagtgcagtggcatgtgcttgtaatcccagctactctggaggctgaggcaggagaattgcttgaacccaggaggcagagattgcggtgagccaagatggcaccactgcactccagcctaggtgacagagtgagactccgtctcaaaaaaaaaaaaaaaacttttttaaaatgttaaaattaatttaaatgtaaaatttctgaatactaatcttagaaatgtgtaaaagatattattttgattgttaaacaaataaaatcctgttttcaaaatgc

SEQ ID NO: 22 - DNA, 2379 bp, Homo sapiens
aaaatgctcccgccgacgcacagcagtgacgacacacaaggtttcggggactgagtgggtttcagactttctctcaggatttccgctggcttcaggttccggtcaggcgtcgggacagagcctgatccaggcttcggcggccggtggcagctctcgatcagctctcgcagtcggagaggcggctaaggaaaggtgccacagcagagacgcgaaggagaggccctagaaccttttcaaagaagaatggaagaaaccatgaagcttgctacgatggaagacacagtggagtactgcctgttcctgataccagatgagtcaagggactcagataaacataaagagattcttcagaagtacattgagagaataatcactcggtttgcacctatgctggtcccctacatctggcagaatcagcctttcaatcttaaatataaacctgggaaaggaggtgttcctgctcatatgtttggcgtgacaaagtttggggataacattgaggatgaatggtttattgtttatgtaataaagcagatcacaaaggaatttccagagttagtagcaaggattgaagacaatgatggtgaattcttgttaatagaagctgctgactttctccctaaatggctggatcctgaaaatagcaccaatagggtatttttctgccatggggaattgtgtattatccctgcaccaagaaaatctggagcagaatcttggttacccaccacacccccaacaattccacaagcattgaatataatcacagcacattcagaaaaaatacttgcttcagaatctatacgagctgctgtgaataggcgcatcagagggtacccagaaaaaattcaggcctcacttcatcgagcacactgcttccttccagctggcattgtggcagtgctaaagcagcgccccagattggtggctgcagcagtccaggcattttacctacgagaccctattgacctgcgagcttgtcgtgttttcaagacattcttgcctgaaacacgaataatgacatcggtcacattcactaaatgtctatatgcacaattggtgcaacaaaggtttgtgccagaccggcggagtggatacaggctgcctcctccatctgatccccagtaccgagcccatgaattgggcatgaaattggctcatggatttgagatcttatgctccaaatgtagcccacatttttctgactgcaagaaatcccttgtgactgcctcaccactctgggccagtttccttgaaagtctgaaaaagaatgattactttaagggactgatagaaggttctgctcagtaccgggaaaggctagaaatggcagagaattacttccagctctcagtagactggccagaaaggttggaggtgcagtggcgcgatcctggcttactgcaagctccacctcctgggttcacgccattcatctgcctcagcctcctgagtacctgggacaacagttctcttgctatgagccctggtgaagaaatcttaaccttattacagacaataccatttgatatagaagaccttaagaaagaagcagctaatcttcccccagaggatgatgaccagtggttagatctctcaccagatcagctggaccagctgctgcaggaagctgttggcaaaaaagaatccgagtctgtttccaaggaggagaaggagcagaactatgacttaactgaagtctcagagagcatgaaagctttcatatccaaagtctcaacccacaagggagcagagctgcctcgagaaccttctgaggctccaatcacttttgatgcagattcttttcttaattattttgataagattttagggccaaggcctaatgagtcagattctgatgatctggatgatgaagactttgaatgtttagatagtgatgatgacttggactttgaaacacacgaacctggcgaagaggcttccctgaaaggaacacttgataatctcaagtcatacatggcccagatggaccaggaactagcacacacctgcatcagcaaaagtttcaccactaggaaccaagtggaacctgtatcccagactaccgataacaattcagatgaggaagattctggtacgggagaatctgttatggcaccagtagatgtagacctgaacctggtttcaaatatattggaatcctatagctcccaagctggactggcaggacctgcttccaatcttttacaaagcatgggagtgcagctgcctgacaacaccgatcacagaccaacaagtaagccaacaaaaaattaaccagcacatttagcttctcttttttctttttaaataaatattgaatatgattctgttcaaaaaaaaaaaaaaaaaaaaaaaaaaaaaaaaaaaaaaaaaaaa

SEQ ID NO: 23 - DNA, 5134 bp, Homo sapiens
ggcctggcgggaaagtcgaaaactacgggcggcgacggcttctcggaagtaatttaagtgcacaagacattggtcaaaatggtttccaaaagaagactgtcaaaatctgaggataaagagagcctgacagaagatgcctccaaaaccaggaagcaaccactttccaaaaagacaaagaaatctcatattgctaatgaagttgaagaaaatgacagcatctttgtaaagcttcttaagatatcaggaattattcttaaaacgggagagagtcagaatcaactagctgtggatcaaatagctttccaaaagaagctctttcagaccctgaggagacacccttcctatcccaaaataatagaagaatttgttagtggcctggagtcttacattgaggatgaagacagtttcaggaactgccttttgtcttgtgagcgtctgcaggatgaggaagccagtatgggtgcatcttattctaagagtctcatcaaactgcttctggggattgacatactgcagcctgccattatcaaaaccttatttgagaagttgccagaatatttttttgaaaacaagaacagtgatgaaatcaacatacctcgactcattgtcagtcaactaaaatggcttgacagagttgtggatggcaaggacctcaccaccaagatcatgcagctgatcagtattgctccagagaacctgcagcatgacatcatcaccagcctacctgagatcctaggggattcccagcacgctgatgtggggaaagaactcagtgacctactgatagagaatacttcactcactgtcccaatcctggatgtcctttcaagcctccgacttgacccaaacttcctattgaaggttcgccagttggtgatggataagttgtcgtctattagattggaggatttacctgtgataataaagttcattcttcattccgtaacagccatggatacacttgaggtaatttctgagcttcgggagaagttggatctgcagcattgtgttttgccatcacggttacaggcttcccaagtaaagttgaaaagtaaaggacgagcaagttcctcaggaaatcaagaaagcagcggtcagagctgtattattctcctctttgatgtaataaagtcagctattagatatgagaaaaccatttcagaagcctggattaaggcaattgaaaacactgcctcagtatctgaacacaaggtgtttgacctggtgatgcttttcatcatctatagcaccaatactcagacaaagaagtacattgacagggtgctaagaaataagattcgatcaggctgcattcaagaacagctgctccagagtacattctctgttcattacttagttcttaaggatatgtgttcatccattctgtcgctggctcagagtttgcttcactctctagaccagagtataatttcatttggcagtctcctatacaaatatgcatttaagttttttgacacgtactgccagcaggaagtggttggtgccttagtgacccatatctgcagtgggaatgaagctgaagttgatactgccttagatgtccttctagagttggtagtgttaaacccatctgctatgatgatgaatgctgtctttgtaaagggcattttagattatctggataacatatcccctcagcaaatacgaaaactcttctatgttctcagcacactggcatttagcaaacagaatgaagccagcagccacatccaggatgacatgcacttggtgataagaaagcagctctctagcaccgtattcaagtacaagctcattgggattattggtgctgtgaccatggctggcatcatggcggcagacagaagtgaatcacctagtttgacccaagagagagccaacctgagcgatgagcagtgcacacaggtgacctccttgttgcagttggttcattcctgcagtgagcagtctcctcaggcctctgcactttactatgatgaatttgccaacctgatccaacatgaaaagctggatccaaaagccctggaatgggttgggcataccatctgtaatgatttccaggatgccttcgtagtggactcctgtgttgttccggaaggtgactttccatttcctgtgaaagcactgtacggactggaagaatacgacactcaggatgggattgccataaacctcctgccgctgctgttttctcaggactttgcaaaagatgggggtccggtgacctcacaggaatcaggccaaaaattggtgtctccgctgtgcctggctccgtatttccggttactgagactttgtgtggagagacagcataacggaaacttggaggagattgatggtctactagattgtcctatattcctaactgacctggagcctggagagaagttggagtccatgtctgctaaagagcgttcattcatgtgttctctcatatttcttactctcaactggttccgagagattgtaaatgccttctgccaggaaacatcacctgagatgaaggggaaggtgctcactcggttaaagcacattgtagaattgcaaataatcctggaaaagtacttggcagtcaccccagactatgtccctcctcttggaaactttgatgtggaaactttagatataacacctcatactgttactgctatttcagcaaaaatcagaaagaaaggaaaaatagaaaggaaacaaaaaacagatggcagcaagacatcctcctctgacacactttcagaagagaaaaattcagaatgtgaccctacgccatctcatagaggccagctaaacaaggagttcacagggaaggaagaaaagacatcattgttactacataattcccatgcttttttccgagagctggacattgaggtcttctctattctacattgtggacttgtgacgaagttcatcttagatactgaaatgcacactgaagctacagaagttgtgcaacttgggccccctgagctgcttttcttgctggaagatctctcccagaagctggagagtatgctgacacctcctattgccaggagagtcccctttctcaagaacaaaggaagccggaatattggattctcacatctccaacagagatctgcccaagaaattgttcattgtgtttttcaactgctgaccccaatgtgtaaccacctggagaacattcacaactattttcagtgtttagctgctgagaatcacggtgtagttgatggaccaggagtgaaagttcaggagtaccacataatgtcttcctgctatcagaggctgctgcagatttttcatgggctttttgcttggagtggattttctcaacctgaaaatcagaatttactgtattcagccctccatgtccttagtagccgactgaaacagggagaacacagccagcctttggaggaactactcagccagagcgtccattacttgcagaatttccatcaaagcattcccagtttccagtgtgctctttatctcatcagacttttgatggttattttggagaaatcaacagcttctgctcagaacaaagaaaaaattgcttcccttgccagacaattcctctgtcgggtgtggccaagtggggataaagagaagagcaacatctctaatgaccagctccatgctctgctctgtatctacctggagcacacagagagcattctgaaggccatagaggagattgctggtgttggtgtcccagaactgatcaactctcctaaagatgcatcttcctccacattccctacactgaccaggcatacttttgttgttttcttccgtgtgatgatggctgaactagagaagacggtgaaaaaaattgagcctggcacagcagcagactcgcagcagattcatgaagagaaactcctctactggaacatggctgttcgagacttcagtatcctcatcaacttgataaaggtatttgatagtcatcctgttctgcatgtatgtttgaagtatgggcgtctctttgtggaagcatttctgaagcaatgtatgccgctcctagacttcagttttagaaaacaccgggaagatgttctgagcttactggaaaccttccagttggacacaaggctgcttcatcacctgtgtgggcattccaagattcaccaggacacgagactcacccaacatgtgcctctgctcaaaaagaccctggaacttttagtttgcagagtcaaagctatgctcactctcaacaattgtagagaggctttctggctgggcaatctaaaaaaccgggacttgcagggtgaagagattaagtcccaaaattcccaggagagcacagcagatgagagtgaggatgacatgtcatcccaggcctccaagagcaaagccactgaggatggtgaagaagacgaagtaagtgctggagaaaaggagcaagatagtgatgagagttatgatgactctgattagaccccagataaattgttgcctgcttctgtgtctctgccagcctgtgatcattttgtgttagagtttgaaatccgctgtttgcctttcttactggtaggatccttttttgttcctctttttttttttttttttttttttttaaagacggggactcgctgtgtttcccaggctggagtgcagtgctgcaatcttggctcactgcaacctccatctcctaggttcaagcgattctcctgcctcagcctcctgagtagctgggacgacaggcacatgccaccatgcccagctaatttttgtatttttagtagatacggggttttaccatgtcggccagatggtctcaatctcctgaactcatgatccacctgcctcagcctcccaaagtgctgggattacaggcatgagccaccgctcccagccatattttgttcttaaagtggggtctttattaacttgtggacatcatggattgtctaacaccatcacagtccctggctcaggattctaatgtagcattatttattggtttggataaacccagctgtgctacactgcagagtaaaatctctgagtcatgattctggactttgggagctagttttgaaactctgatttattgtagaacttaggcttgtaccaattttacaaataaattctgttctaagttcaaaaaaaaaaaaaaaaaaaaaaaaaaaaaaaa

SEQ ID NO: 24 - DNA, 2565 bp, Homo sapiens
aacggctgcggcttcgggcggccgggtttctccggtctcccaacgccgaggagagcttgtaacaggcgctggagctggcccgccaccgccgcgtcagggacggcgctggagtcctccgttcccctcagcctctgagctgaggccccacaccagagtagggggcggcgcggcacccgtgccccggcatggcgacaccggacgcggggctccctggggctgagggcgtggagccggcgccctgggcgcagctggaggcccccgcccgcctcctgctgcaggcgctgcaggcggggcctgagggggcgcggcgcggcctgggggtgctccgggcgctgggcagccgcggctgggagcccttcgactggggtcgcttgctcgaggccctgtgccgggaggagccggtcgtgcaggggcctgacggccgtctggagctgaaaccactgttgctgcgattgccccggatatgccagaggaacctgatgtccctgctgatggccgttcggccatcgctgccggaaagtgggctcctctctgtgctgcagattgcccagcaggacctagcccctgacccagatgcctggctccgtgccctgggggaattgctgcgaagggatttgggggtggggacctccatggagggagcttctccactgtctgaaagatgccagagacagctccaaagtctatgtagggggctgggcctggggggcaggaggttgaaatccccccaggctccagaccctgaagaagaggagaacagggactcccagcagcctgggaaacgcagaaaggactcagaggaagaggctgccagtcctgaggggaagagggtccccaaaagattacggtgttgggaagaggaagaagatcatgagaaggagagacccgaacataagtcactggaatccctggcagatggaggaagtgcatctcctattaaggaccagcctgtcatggcagttaagactggcgaggacggttcgaatctggatgatgctaaaggtctggctgagagtttggagttgcccaaagctatccaggaccagcttcccaggctgcagcagctgctgaagaccttggaggaggggttagagggattggaggatgcccccccagttgagctacagcttcttcacgaatgtagtcccagccagatggacttgctgtgtgcccagctgcagctccctcagctctcagacctcggtctcctgcggctctgcacctggctgctggccctttcacctgatctcagcctcagcaatgctactgtgctgaccagaagcctctttcttggacggatcctctccttgacttcctcagcctcccgcctgcttacaactgccctgacctccttctgtgccaaatatacataccctgtctgcagcgccctccttgaccctgtgctccaggccccaggcacaggtcctgctcaaacagagttactgtgttgccttgtgaagatggagtccctggagccagatgcacaggttctaatgctgggacagatcttggagctgccctggaaggaggaaactttcttggtgttgcagtcactcctagagcggcaggtggagatgacccctgagaagttcagtgtcttaatggagaagctctgtaaaaaggggctggcagccaccacctccatggcctatgccaagctcatgctgacagtgatgaccaagtatcaggctaacatcactgagacccagaggctgggcctggctatggccctagaacctaacaccaccttcctgaggaagtccctgaaggccgccttgaaacatttgggcccctgaccatccaccaagggaccaccctcttggtgctccatcaccagcttcctgaagggcatttctttcttcaccaccttgtcttgagccctagcctgaggataaaggctgagcctggccatcccagattgcaactgcctccctgttacaggctgcatagggaatattggcttcccagccagcagggaggctcctgggctaagggagctcagctatattttctttttcatttcttttgtttttgagagaaggtattgctctgtcatccaggctggagtgcagtgatgcgattgatcatggctcactgtaacctctgcctcccaggctcgatcctcccatgtcagcctcccaagtagctgggactacatgcacatgacactatgcccagctaattttttattttgtagataatatgctggtcagggctggtcttgaactcctgagctcaagtgatcttcctgccttggcacccaaagtgttgagatttacaggtgtgagccaccacaccaggccagagctatatttccaaaggctgctggccccaggcacactcctcatcaattctcaggctgcagggacaaactttccgatagggctcagtaggatcaagccgacccagagtgggcatgggatgctccaggaggtctggggtaccagtgggctcagatgaagctcttgtgctcatgtatattatgaccttctgtgtttttgtttctgacttgaataatttatcaatggtgttgaataaaagcaagttcaataatgaaaaaaaaaa

SEQ ID NO: 25 - DNA, 2649 bp, Homo sapiens
aggaggacctgggggtgtggcagcgaggaagggccgagccacggactgtggggccgaaactcgctcccgcccaccctttctcgaggctgtggcctccgcgagagccgagcgggccgcaccgccggccgtgcgactgccccagtcagacacgaccccggcttctagcccgcctaagcctgtttggggttgctgactcgtttcctccccgagtttcccgcgggaactaactcttcaagaggaccaaccgcagcccagagcttcgcagacccggccaaccagaggcgaggttgagagcccggcgggccgcggggagagagcgtcccatctgtcctggaaagcctgggcgggtggattgggaccccgagagaagcaggggagctcggcggggtgcagaagtgcccaggcccctccccgctggggttgggagcttgggcaggccagcttcacccttcctaagtccgcttctggtctccgggcccagcctcggccaccatgtcccgccagaccacctctgtgggctccagctgcctggacctgtggagggaaaagaatgaccggctcgttcgacaggccaaggtggctcagaactccggtctgactctgaggcgacagcagttggctcaggatgcactggaagggctcagagggctcctccatagtctgcaagggctccctgcagctgttcctgttcttcccttggagctgactgtcacctgcaacttcattatcctgagggcaagcttggcccagggtttcacagaggatcaggcccaggatatccagcggagcctagagagagtgctggagacacaggagcagcaggggcccaggttggaacaggggctcagggagctgtgggactctgtccttcgtgcttcctgccttctgccggagctgctgtctgccctgcaccgcctggttggcctgcaggctgccctctggttgagtgctgaccgtcttggggacctggccttgttactagagaccctgaatggcagccagagtggagcctctaaggatctgctgttacttctgaaaacttggagtcccccagctgaggaattagatgctccattgaccctgcaggatgcccagggattgaaggatgtcctcctgacagcatttgcctaccgccaaggtctccaggagctgatcacagggaacccagacaaggcactaagcagccttcatgaagcggcctcaggcctgtgtccacggcctgtgttggtccaggtgtacacagcactggggtcctgtcaccgtaagatgggaaatccacagagagcactgttgtacttggttgcagccctgaaagagggatcagcctggggtcctccacttctggaggcctctaggctctatcagcaactgggggacacaacagcagagctggagagtctggagctgctagttgaggccttgaatgtcccatgcagttccaaagccccgcagtttctcattgaggtagaattactactgccaccacctgacctagcctcaccccttcattgtggcactcagagccagaccaagcacatactagcaagcaggtgcctacagacggggagggcaggagacgctgcagagcattacttggacctgctggccctgttgctggatagctcggagccaaggttctccccacccccctcccctccagggccctgtatgcctgaggtgtttttggaggcagcggtagcactgatccaggcaggcagagcccaagatgccttgactctatgtgaggagttgctcagccgcacatcatctctgctacccaagatgtcccggctgtgggaagatgccagaaaaggaaccaaggaactgccatactgcccactctgggtctctgccacccacctgcttcagggccaggcctgggttcaactgggtgcccaaaaagtggcaattagtgaatttagcaggtgcctcgagctgctcttccgggccacacctgaggaaaaagaacaaggggcagctttcaactgtgagcagggatgtaagtcagatgcggcactgcagcagcttcgggcagccgccctaattagtcgtggactggaatgggtagccagcggccaggataccaaagccttacaggacttcctcctcagtgtgcagatgtgcccaggtaatcgagacacttactttcacctgcttcagactctgaagaggctagatcggagggatgaggccactgcactctggtggaggctggaggcccaaactaaggggtcacatgaagatgctctgtggtctctccccctgtacctagaaagctatttgagctggatccgtccctctgatcgtgacgccttccttgaagaatttcggacatctctgccaaagtcttgtgacctgtagctgccacgttttgaagagcttgagctgggtccccagtgggctgtctctctgtggggagggctttctgcttcaccatcattaggaatgtgaccattcctatataattcctggactggtgagattggtggtaggcctgtgaaatttgccctagttactaccattctcgttttggaggaaacaatctctgccaccaccaagtcattgactttgctcgaggcaccttttttcctgtttctccttttctgttgtcgagtaaaatttcatatttataaaaaaaaaaaaaaaaaa

SEQ ID NO: 26 - DNA, 4749 bp, Homo sapiens
tcttgttgttacgggtaacggaagtgtggcggcgttgggttgagcgggctttttggaagtttgtggcggagttctgtgatatgagcaacaatggaccagaagattttatctctagcagcagaaaaaacagcagacaaactgcaagaatttcttcaaaccctgagagaaggtgatttgactaatctccttcagaatcaagcagtgaaaggaaaagttgctggagcactcctgagagccatcttcaaaggttccccctgctctgaggaagctggaacacttaggagacgtaagatatacacttgttgtatccagttggtggaatcgggggatttgcagaaagaaatagcgtctgagatcataggattactgatgctggaggctcaccattttccaggaccattattggttgaattagccaatgagtttattagtgctgtcagagaaggcagcctagtgaatggaaaatctttggagttactacctatcattctcactgccctggctacgaaaaaggaaaatctggcttatggaaaaggtgtactgagtggggaagaatgtaagaaacagttgattaacaccctgtgttctggcaggtgggatcagcaatatgtaatccaactcacctccatgttcaaggatgtccctctgactgcagaagaggtggaatttgtggtggaaaaagcattgagcatgttctccaagatgaatcttcaagaaataccacctttggtctatcagcttctggttctctcctccaagggaagcagaaagagtgttttggaaggaatcatagccttcttcagtgcactagataagcagcacaatgaggaacagagtggtgacgagctattggatgttgtcactgtgccatcaggtgaacttcgtcatgtggaaggcaccattattctacacattgtgtttgccatcaaattggactatgaactaggcagagaactcgtgaaacacttaaaggtaggacagcaaggagattccaataataacttaagtcccttcagcattgctcttcttctgtctgtaacaagaatacaaagatttcaggaccaggtgcttgatcttttaaagacttcggttgtaaagagctttaaggatcttcaactcctccaaggctcaaaatttcttcagaatctagttcctcatagatcttatgtttcaaccatgatcttggaagtagtgaagaatagcgttcatagctgggaccatgttactcagggcctcgtagaacttggtttcattttgatggattcatatgggccaaagaaggttcttgatggaaaaactattgaaaccagcccaagtctttctagaatgccaaaccagcatgcatgtaagctcggagctaatatcctgttggaaacttttaagatccatgagatgatcagacaagaaattttggagcaggtcctcaacagggttgttaccagagcatcttctcccatcagtcatttcttagacctgctttcaaatatcgtcatgtatgcacccttagttcttcaaagttgttcttctaaagtcacagaagcttttgactatttgtcctttctgccccttcagactgtacaaaggctgcttaaggcagtgcagccccttctcaaagtcagcatgtcaatgagagactgcttgatacttgtccttcggaaagctatgtttgccaaccagcttgatgcccgaaaatctgcagttgctgggtttttgctgctcctgaagaactttaaagttttaggcagcctgtcatcctctcagtgcagtcagtctctcagtgtcagtcaggttcatgtggatgttcacagccattacaattctgtcgccaatgaaactttttgccttgagatcatggatagtttgaggagatgcttaagccagcaagctgatgttcgactcatgctttatgaggggttttatgatgttcttcgaaggaactctcagctggctaattcagtcatgcaaactctgctctcacagttaaaacagttctatgagccaaaacctgatctgctgcctcctctgaaattagaagcttgtattctgacccaaggagataagatctctctacaagaaccactggattatctgctgtgttgtattcagcattgtttggcctggtataagaatacagtcatacccttacagcagggagaggaggaagaggaggaggaagaggcattctacgaagacctagatgatatattggagtccattactaatagaatgattaagagtgagctggaagactttgaactggataaatcagcagatttttctcagagcaccagtattggcataaaaaataatatctgtgcttttcttgtgatgggagtttgtgaggttttaatagaatacaatttctccataagtagtttcagtaagaataggtttgaggacattctgagcttatttatgtgttacaaaaaactctctgacattcttaatgaaaaagcgggtaaagccaaaactaaaatggccaacaagacaagtgatagtcttttgtccatgaaatttgtgtccagtcttctcactgctcttttcagggatagtatccaaagccaccaagaaagcctttctgttctcaggtccagcaatgagtttatgcgctatgcagtgaatgtagctctgcagaaagtacagcagctaaaggaaacagggcatgtgagtggccctgatggccaaaacccagaaaagatctttcagaacctctgtgacataactcgagtcttgctatggagatacacttcaattcctacttcagtggaagagtcgggaaagaaagagaaaggaaagagcatctcactgctgtgcttggagggtttacagaaaatattcagtgctgtgcaacagttctatcagcccaagattcagcagtttctcagagctctggatgtcacagataaggaaggagaagagagagaagatgcagatgtcagtgtcactcagagaacagcattccagatccggcaatttcagaggtccttgttgaatttacttagcagtcaagaggaagattttaatagcaaagaagccctcctgctagtcacggttcttaccagtttgtccaagttactggagccctcctctcctcagtttgtgcagatgttatcctggacatcaaagatttgcaaggaaaacagccgggaggatgccttgttttgcaagagcttgatgaacttgctcttcagcctgcatgtttcgtataagagtcctgtcattctgctgcgtgacttgtcccaggatatccacgggcatctgggagatatagaccaggatgtagaggtggagaaaacaaaccactttgcaatagtgaatttgagaacggctgcccccactgtctgtttacttgttctgagtcaggccgagaaggttctagaagaagtggactggctaatcaccaagcttaagggacaagtgagccaagaaaccttatcagaagaggcctcttctcaggcaaccctaccaaatcagcctgttgagaaagctatcatcatgcaactgggaactctgcttacatttttccacgagctggtgcagacagctctgccatcaggcagctgtgtggacaccttgttaaaggacttgtgcaaaatgtacaccacacttacagcccttgtcagatattatctccaggtgtgtcagagctccggaggaattccaaaaaatatggaaaagctggtgaagctgtctggttctcatctgacccccctgtgttattctttcatttcttacgtacagaataagagtaagagcctgaactatacgggagagaaaaaggagaaacctgctgccgttgccacagccatggccagagttcttcgggaaaccaagccaatccctaacctcatctttgccatagaacagtatgaaaaatttctcatccacctttctaagaagtccaaggtgaacctgatgcagcacatgaagctcagcacctcacgagacttcaagatcaaaggaaacatcctagacatggttcttcgagaggatggtgaagatgaaaatgaagagggcactgcatcagagcatgggggacagaacaaagaaccagccaagaagaaaaggaaaaaataaatgaaatgcctgagttaatgtgaactttggggcttctgcttcatttttacccaacaagcaacaatgccccttgtcctgtagtccacaccgatgttggcatcttggttctgaacccactgaattcaactgcaccttcagttagaaggaatcttcttggcaggtcctgctactgaaaaatggctggccttaggcaagcccttttgcaaaaagcacagctgaaagcctgagtttgggagcctgcaccaccccgatgaagctccacgggagcaaatacagagcctccaggcagtgctatggtccaggctggcttcgtttttccaaggagcctttggtgagttcaattatctggtaaatatccagcgcttcacctgaaagatagtgcaaattggttaggatgccacctcaagaactgtaactgagagctcagaagtgagcaaaggagcttaatgctaaggtcaaaaggagagtgaaaggttgagaacaattgccacgaacggtaatgttacatgttaggagggtctgttttctttttatataagtgtgtcttagatatattttaaatagaaaataagctttctgatttacttgtttggtatttaaagcacagtttgtttttctgtcacctatagagtgcaagaatgcactctatagaataaattatctttaaacatt

SEQ ID NO: 27 - DNA, 8557 bp, Homo sapiens
attcgcgtggaggcgcgtcgcgcgcagcggacgccgacagaatccccgaggcgcctggcgcgggcgcgggcgcgaaggcgatccgggcgccaccccgcggtcatcggtcaccggtcgctctcaggaacagcagcgcaacctctgctccctgcctcgcctcccgcgcgcctaggtgcctgcgactttaattaaagggccgtcccctcgccgaggctgcagcaccgcccccccggcttctcgcgcctcaaaatgagtagctcccactctcgggcgggccagagcgcagcaggcgcggctccgggcggcggcgtcgacacgcgggacgccgagatgccggccaccgagaaggacctggcggaggacgcgccgtggaagaagatccagcagaacactttcacgcgctggtgcaacgagcacctgaagtgcgtgagcaagcgcatcgccaacctgcagacggacctgagcgacgggctgcggcttatcgcgctgttggaggtgctcagccagaagaagatgcaccgcaagcacaaccagcggcccactttccgccaaatgcagcttgagaacgtgtcggtggcgctcgagttcctggaccgcgagagcatcaaactggtgtccatcgacagcaaggccatcgtggacgggaacctgaagctgatcctgggcctcatctggaccctgatcctgcactactccatctccatgcccatgtgggacgaggaggaggatgaggaggccaagaagcagacccccaagcagaggctcctgggctggatccagaacaagctgccgcagctgcccatcaccaacttcagccgggactggcagagcggccgggccctgggcgccctggtggacagctgtgccccgggcctgtgtcctgactgggactcttgggacgccagcaagcccgttaccaatgcgcgagaggccatgcagcaggcggatgactggctgggcatcccccaggtgatcacccccgaggagattgtggaccccaacgtggacgagcactctgtcatgacctacctgtcccagttccccaaggccaagctgaagccaggggctcccttgcggcccaaactgaacccgaagaaagcccgtgcctacgggccaggcatcgagcccacaggcaacatggtgaagaagcgggcagagttcactgtggagaccagaagtgctggccagggagaggtgctggtgtacgtggaggacccggccggacaccaggaggaggcaaaagtgaccgccaataacgacaagaaccgcaccttctccgtctggtacgtccccgaggtgacggggactcataaggttactgtgctctttgctggccagcacatcgccaagagccccttcgaggtgtacgtggataagtcacagggtgacgccagcaaagtgacagcccaaggtcccggcctggagcccagtggcaacatcgccaacaagaccacctactttgagatctttacggcaggagctggcacgggcgaggtcgaggttgtgatccaggaccccatgggacagaagggcacggtagagcctcagctggaggcccggggcgacagcacataccgctgcagctaccagcccaccatggagggcgtccacaccgtgcacgtcacgtttgccggcgtgcccatccctcgcagcccctacactgtcactgttggccaagcctgtaacccgagtgcctgccgggcggttggccggggcctccagcccaagggtgtgcgggtgaaggagacagctgacttcaaggtgtacacaaagggcgctggcagtggggagctgaaggtcaccgtgaagggccccaagggagaggagcgcgtgaagcagaaggacctgggggatggcgtgtatggcttcgagtattaccccatggtccctggaacctatatcgtcaccatcacgtggggtggtcagaacatcgggcgcagtcccttcgaagtgaaggtgggcaccgagtgtggcaatcagaaggtacgggcctggggccctgggctggagggcggcgtcgttggcaagtcagcagactttgtggtggaggctatcggggacgacgtgggcacgctgggcttctcggtggaagggccatcgcaggctaagatcgaatgtgacgacaagggcgacggctcctgtgatgtgcgctactggccgcaggaggctggcgagtatgccgttcacgtgctgtgcaacagcgaagacatccgcctcagccccttcatggctgacatccgtgacgcgccccaggacttccacccagacagggtgaaggcacgtgggcctggattggagaagacaggtgtggccgtcaacaagccagcagagttcacagtggatgccaagcacggtggcaaggccccacttcgggtccaagtccaggacaatgaaggctgccctgtggaggcgttggtcaaggacaacggcaatggcacttacagctgctcctacgtgcccaggaagccggtgaagcacacagccatggtgtcctggggaggcgtcagcatccccaacagccccttcagggtgaatgtgggagctggcagccaccccaacaaggtcaaagtatacggccccggagtagccaagacagggctcaaggcccacgagcccacctacttcactgtggactgcgccgaggctggccagggggacgtcagcatcggcatcaagtgtgcccctggagtggtaggccccgccgaagctgacatcgacttcgacatcatccgcaatgacaatgacaccttcacggtcaagtacacgccccggggggctggcagctacaccattatggtcctctttgctgaccaggccacgcccaccagccccatccgagtcaaggtggagccctctcatgacgccagtaaggtgaaggccgagggccctggcctcagtcgcactggtgtcgagcttggcaagcccacccacttcacagtaaatgccaaagctgctggcaaaggcaagctggacgtccagttctcaggactcaccaagggggatgcagtgcgagatgtggacatcatcgaccaccatgacaacacctacacagtcaagtacacgcctgtccagcagggtccagtaggcgtcaatgtcacttatggaggggatcccatccctaagagccctttctcagtggcagtatctccaagcctggacctcagcaagatcaaggtgtctggcctgggagagaaggtggacgttggcaaagaccaggagttcacagtcaaatcaaagggtgctggtggtcaaggcaaagtggcatccaagattgtgggcccctcgggtgcagcggtgccctgcaaggtggagccaggcctgggggctgacaacagtgtggtgcgcttcctgccccgtgaggaagggccctatgaggtggaggtgacctatgacggcgtgcccgtgcctggcagcccctttcctctggaagctgtggcccccaccaagcctagcaaggtgaaggcgtttgggccggggctgcagggaggcagtgcgggctcccccgcccgcttcaccatcgacaccaagggcgccggcacaggtggcctgggcctgacggtggagggcccctgtgaggcgcagctcgagtgcttggacaatggggatggcacatgttccgtgtcctacgtgcccaccgagcccggggactacaacatcaacatcctcttcgctgacacccacatccctggctccccattcaaggcccacgtggttccctgctttgacgcatccaaagtcaagtgctcaggccccgggctggagcgggccaccgctggggaggtgggccaattccaagtggactgctcgagcgcgggcagcgcggagctgaccattgagatctgctcggaggcggggcttccggccgaggtgtacatccaggaccacggtgatggcacgcacaccattacctacattcccctctgccccggggcctacaccgtcaccatcaagtacggcggccagcccgtgcccaacttccccagcaagctgcaggtggaacctgcggtggacacttccggtgtccagtgctatgggcctggtattgagggccagggtgtcttccgtgaggccaccactgagttcagtgtggacgcccgggctctgacacagaccggagggccgcacgtcaaggcccgtgtggccaacccctcaggcaacctgacggagacctacgttcaggaccgtggcgatggcatgtacaaagtggagtacacgccttacgaggagggactgcactccgtggacgtgacctatgacggcagtcccgtgcccagcagccccttccaggtgcccgtgaccgagggctgcgacccctcccgggtgcgtgtccacgggccaggcatccaaagtggcaccaccaacaagcccaacaagttcactgtggagaccaggggagctggcacgggcggcctgggcctggctgtagagggcccctccgaggccaagatgtcctgcatggataacaaggacggcagctgctcggtcgagtacatcccttatgaggctggcacctacagcctcaacgtcacctatggtggccatcaagtgccaggcagtcctttcaaggtccctgtgcatgatgtgacagatgcgtccaaggtcaagtgctctgggcccggcctgagcccaggcatggttcgtgccaacctccctcagtccttccaggtggacacaagcaaggctggtgtggccccattgcaggtcaaagtgcaagggcccaaaggcctggtggagccagtggacgtggtagacaacgctgatggcacccagaccgtcaattatgtgcccagccgagaagggccctacagcatctcagtactgtatggagatgaagaggtaccccggagccccttcaaggtcaaggtgctgcctactcatgatgccagcaaggtgaaggccagtggccccgggctcaacaccactggcgtgcctgccagcctgcccgtggagttcaccatcgatgcaaaggacgccggggagggcctgctggctgtccagatcacggatcccgaaggcaagccgaagaagacacacatccaagacaaccatgacggcacgtatacagtggcctacgtgccagacgtgacaggtcgctacaccatcctcatcaagtacggtggtgacgagatccccttctccccgtaccgcgtgcgtgccgtgcccaccggggacgccagcaagtgcactgtcacagtgtcaatcggaggtcacgggctaggtgctggcatcggccccaccattcagattggggaggagacggtgatcactgtggacactaaggcggcaggcaaaggcaaagtgacgtgcaccgtgtgcacgcctgatggctcagaggtggatgtggacgtggtggagaatgaggacggcactttcgacatcttctacacggccccccagccgggcaaatacgtcatctgtgtgcgctttggtggcgagcacgtgcccaacagccccttccaagtgacggctctggctggggaccagccctcggtgcagccccctctacggtctcagcagctggccccacagtacacctacgcccagggcggccagcagacttgggccccggagaggcccctggtgggtgtcaatgggctggatgtgaccagcctgaggccctttgaccttgtcatccccttcaccatcaagaagggcgagatcacaggggaggttcggatgccctcaggcaaggtggcgcagcccaccatcactgacaacaaagacggcaccgtgaccgtgcggtatgcacccagcgaggctggcctgcacgagatggacatccgctatgacaacatgcacatcccaggaagccccttgcagttctatgtggattacgtcaactgtggccatgtcactgcctatgggcctggcctcacccatggagtagtgaacaagcctgccaccttcaccgtcaacaccaaggatgcaggagaggggggcctgtctctggccattgagggcccgtccaaagcagaaatcagctgcactgacaaccaggatgggacatgcagcgtgtcctacctgcctgtgctgccgggggactacagcattctagtcaagtacaatgaacagcacgtcccaggcagccccttcactgctcgggtcacaggtgacgactccatgcgtatgtcccacctaaaggtcggctctgctgccgacatccccatcaacatctcagagacggatctcagcctgctgacggccactgtggtcccgccctcgggccgggaggagccctgtttgctgaagcggctgcgtaatggccacgtggggatttcattcgtgcccaaggagacgggggagcacctggtgcatgtgaagaaaaatggccagcacgtggccagcagccccatcccggtggtgatcagccagtcggaaattggggatgccagtcgtgttcgggtctctggtcagggccttcacgaaggccacacctttgagcctgcagagtttatcattgatacccgcgatgcaggctatggtgggctcagcctgtccattgagggccccagcaaggtggacatcaacacagaggacctggaggacgggacgtgcagggtcacctactgccccacagagccaggcaactacatcatcaacatcaagtttgccgaccagcacgtgcctggcagccccttctctgtgaaggtgacaggcgagggccgggtgaaagagagcatcacccgcaggcgtcgggctccttcagtggccaacgttggtagtcattgtgacctcagcctgaaaatccctgaaattagcatccaggatatgacagcccaggtgaccagcccatcgggcaagacccatgaggccgagatcgtggaaggggagaaccacacctactgcatccgctttgttcccgctgagatgggcacacacacagtcagcgtgaagtacaagggccagcacgtgcctgggagccccttccagttcaccgtggggcccctaggggaagggggagcccacaaggtccgagctgggggccctggcctggagagagctgaagctggagtgccagccgaattcagtatctggacccgggaagctggtgctggaggcctggccattgctgtcgagggccccagcaaggctgagatctcttttgaggaccgcaaggacggctcctgtggtgtggcttatgtggtccaggagccaggtgactacgaagtctcagtcaagttcaacgaggaacacattcccgacagccccttcgtggtgcctgtggcttctccgtctggcgacgcccgccgcctcactgtttctagccttcaggagtcagggctaaaggtcaaccagccagcctcttttgcagtcagcctgaacggggccaagggggcgatcgatgccaaggtgcacagcccctcaggagccctggaggagtgctatgtcacagaaattgaccaagataagtatgctgtgcgcttcatccctcgggagaatggcgtttacctgattgacgtcaagttcaacggcacccacatccctggaagccccttcaagatccgagttggggagcctgggcatggaggggacccaggcttggtgtctgcttacggagcaggtctggaaggcggtgtcacagggaacccagctgagttcgtcgtgaacacgagcaatgcgggagctggtgccctgtcggtgaccattgacggcccctccaaggtgaagatggattgccaggagtgccctgagggctaccgcgtcacctatacccccatggcacctggcagctacctcatctccatcaagtacggcggcccctaccacattgggggcagccccttcaaggccaaagtcacaggcccccgtctcgtcagcaaccacagcctccacgagacatcatcagtgtttgtagactctctgaccaaggccacctgtgccccccagcatggggccccgggtcctgggcctgctgacgccagcaaggtggtggccaagggcctggggctgagcaaggcctacgtaggccagaagagcagcttcacagtagactgcagcaaagcaggcaacaacatgctgctggtgggggttcatggcccaaggaccccctgcgaggagatcctggtgaagcacgtgggcagccggctctacagcgtgtcctacctgctcaaggacaagggggagtacacactggtggtcaaatggggggacgagcacatcccaggcagcccctaccgcgttgtggtgccctgagtctggggcccgtgccagccggcagcccccaagcctgccccgctacccaagcagccccgccctcttcccctcaaccccggcccaggccgccctggccgcccgcctgtcactgcagccgcccctgccctgtgccgtgctgcgctcacctgcctccccagccagccgctgacctctcggctttcacttgggcagagggagccatttggtggcgctgcttgtcttctttggttctgggaggggtgagggatgggggtcctgtacacaaccacccactagttctcttctccagccaagaggaataaagttttgcttccattaaaaaaaaaaaaaaaaaaaaaaaaaaaaaaaaaaaaaaaaaaaaaaa

SEQ ID NO: 28 - DNA, 3628 bp, Homo sapiens
agagcatcagcaagagtagcagcgagcagccgcgctggtggcggcggcgcgtcgttgcagttgcgccatctgtcaggagcggagccggcgaggagggggctgccgcgggcgaggaggaggggtcgccgcgagccgaaggccttcgagacccgcccgccgcccggcggcgagagtagaggcgaggttgttgtgcgagcggcgcgtcctctcccgcccgggcgcgccgcgcttctcccagcgcaccgaggaccgcccgggcgcacacaaagccgccgcccgcgccgcaccgcccggcggccgccgcccgcgccagggagggattcggccgccgggccggggacaccccggcgccgccccctcggtgctctcggaaggcccaccggctcccgggcccgccggggaccccccggagccgcctcggccgcgccggaggagggcggggagaggaccatgtgagtgggctccggagcctcagcgccgcgcagtttttttgaagaagcaggatgctgatctaaacgtggaaaaagaccagtcctgcctctgttgtagaagacatgtggtgtatataaagtttgtgatcgttggcggacattttggaatttagataatgggctgtgtgcaatgtaaggataaagaagcaacaaaactgacggaggagagggacggcagcctgaaccagagctctgggtaccgctatggcacagaccccacccctcagcactaccccagcttcggtgtgacctccatccccaactacaacaacttccacgcagccgggggccaaggactcaccgtctttggaggtgtgaactcttcgtctcatacggggaccttgcgtacgagaggaggaacaggagtgacactctttgtggccctttatgactatgaagcacggacagaagatgacctgagttttcacaaaggagaaaaatttcaaatattgaacagctcggaaggagattggtgggaagcccgctccttgacaactggagagacaggttacattcccagcaattatgtggctccagttgactctatccaggcagaagagtggtactttggaaaacttggccgaaaagatgctgagcgacagctattgtcctttggaaacccaagaggtacctttcttatccgcgagagtgaaaccaccaaaggtgcctattcactttctatccgtgattgggatgatatgaaaggagaccatgtcaaacattataaaattcgcaaacttgacaatggtggatactacattaccacccgggcccagtttgaaacacttcagcagcttgtacaacattactcagagagagctgcaggtctctgctgccgcctagtagttccctgtcacaaagggatgccaaggcttaccgatctgtctgtcaaaaccaaagatgtctgggaaatccctcgagaatccctgcagttgatcaagagactgggaaatgggcagtttggggaagtatggatgggtacctggaatggaaacacaaaagtagccataaagactcttaaaccaggcacaatgtcccccgaatcattccttgaggaagcgcagatcatgaagaagctgaagcacgacaagctggtccagctctatgcagtggtgtctgaggagcccatctacatcgtcaccgagtatatgaacaaaggaagtttactggatttcttaaaagatggagaaggaagagctctgaaattaccaaatcttgtggacatggcagcacaggtggctgcaggaatggcttacatcgagcgcatgaattatatccatagagatctgcgatcagcaaacattctagtggggaatggactcatatgcaagattgctgacttcggattggcccgattgatagaagacaatgagtacacagcaagacaaggtgcaaagttccccatcaagtggacggcccccgaggcagccctgtacgggaggttcacaatcaagtctgacgtgtggtcttttggaatcttactcacagagctggtcaccaaaggaagagtgccatacccaggcatgaacaaccgggaggtgctggagcaggtggagcgaggctacaggatgccctgcccgcaggactgccccatctctctgcatgagctcatgatccactgctggaaaaaggaccctgaagaacgccccacttttgagtacttgcagagcttcctggaagactactttaccgcgacagagccccagtaccaacctggtgaaaacctgtaaggcccgggtctgcggagagaggccttgtcccagaggctgccccacccctccccattagctttcaattccgtagccagctgctccccagcagcggaaccgcccaggatcagattgcatgtgactctgaagctgacgaacttccatggccctcattaatgacacttgtccccaaatccgaacctcctctgtgaagcattcgagacagaaccttgttatttctcagactttggaaaatgcattgtatcgatgttatgtaaaaggccaaacctctgttcagtgtaaatagttactccagtgccaacaatcctagtgctttccttttttaaaaatgcaaatcctatgtgattttaactctgtcttcacctgattcaactaaaaaaaaaaaagtattattttccaaaagtggcctctttgtctaaaacaataaaattttttttcatgttttaacaaaaaccaatcaggacaggtgtttgtttttgttttcttttttataaatatgaatatatataatatatatgtccctgtacatatacaatgtgggtgctaatgtggagactgtggccggcctgagccaccaagctgcgggacccagagggaggattttactgcaagtcagcatcaaagcaccggtgttattctgaaaacaccagtggcctcatttttggcttttgcaaagcatgaattttttcatttggattgcactttcctggttcatgactgtacctgtaggtggttgttactttgactcttttcaggaaccaccccccaagctgaatttacaagttctgttagcactatttgcttcaacttactgcgatttgttctcaaaacttaaaaataagcaagcaaatggctgatactaccaagagaactggaagatggataccacacaaacttcttgtataaaaatatgaatgctgaaatgtttcagacatttttaatttaataaacctgtaaccacatttaagtgatctaaaacccatagcattgtagtcatggcaacccgctaaactttctcatgcaactaaaatttctgggggaaatgagggtgggggttgtacatttcccattgtaaaataagtgttttaaatgtcctgtactgctaacgaatgactttctatatgtccaggagttctccagtggaataactatgcactactttacatttcatggggatgcacaaaaacaaaaaagtattacatttttagttgctgtttgtaccaaccttaaattacatatgtttaacaacaacaaatcaaaaatcctatttctattgagtttttaatactgactagcaactctgaagtcttaattccttttttgttatgatttatttgtgagtttacatttttaaattgtttaactttcttaatttagtaattaaaaagagagcattttacatttgaa

SEQ ID NO: 29 - DNA, 3303 bp, Homo sapiens
agttctcgcgggacaccgacggggagcggaagccaggaggtattgctgcttcggcgaccgggcggcggcagcggcggcggcggctgtggcagagtctgtgcctgtggcggtgacggcggcgggagcaagcgctgccctcgcagagcagccttggggtcgccggccgctcgcagcgttgtggaggggcgggccggacgctgagcggagcagctgcgccacgggtggcattgtgtgtcccagagtgccggagcgagtcccagaagagaggcgaggctaagcccagagcgctgggttgcttcagcagggaagactcccttccccctgcttcaggctgctgagcactgagcagcgctcagaatggaagccatcgccaaatatgacttcaaagctactgcagacgacgagctgagcttcaaaaggggggacatcctcaaggttttgaacgaagaatgtgatcagaactggtacaaggcagagcttaatggaaaagacggcttcattcccaagaactacatagaaatgaaaccacatccgtggttttttggcaaaatccccagagccaaggcagaagaaatgcttagcaaacagcggcacgatggggcctttcttatccgagagagtgagagcgctcctggggacttctccctctctgtcaagtttggaaacgatgtgcagcacttcaaggtgctccgagatggagccgggaagtacttcctctgggtggtgaagttcaattctttgaatgagctggtggattatcacagatctacatctgtctccagaaaccagcagatattcctgcgggacatagaacaggtgccacagcagccgacatacgtccaggccctctttgactttgatccccaggaggatggagagctgggcttccgccggggagattttatccatgtcatggataactcagaccccaactggtggaaaggagcttgccacgggcagaccggcatgtttccccgcaattatgtcacccccgtgaaccggaacgtctaagagtcaagaagcaattatttaaagaaagtgaaaaatgtaaaacacatacaaaagaattaaacccacaagctgcctctgacagcagcctgtgagggagtgcagaacacctggccgggtcaccctgtgaccctctcactttggttggaactttagggggtgggagggggcgttggatttaaaaatgccaaaacttacctataaattaagaagagtttttattacaaattttcactgctgctcctctttcccctcctttgtcttttttttcatccttttttctcttctgtccatcagtgcatgacgtttaaggccacgtatagtcctagctgacgccaataataaaaaacaagaaaccaagtgggctggtattctctctatgcaaaatgtctgttttagttggaatgactgaaagaagaacagctgttcctgtgttcttcgtatatacacacaaaaaggagcgggcagggccgctcgatgcctttgctgtttagcttcctccagaggaggggacttgtaggaatctgccttccagcccagacccccagtgtattttgtccaagttcacagtagagtagggtagaaggaaagcatgtctctgcttccatggcttcctgagaaagcccacctgggctgggcgcggtggctcacgcctgtaatcccagcactttgggaggccaaggtgggcggatcacaaggtcaggagttcgagaccaacctagccaacatggtgaaaccccgtctctactaaaaataagaaattagccgggtgtggcacgcacctgtagtcccagctacttgggagcctgaggcaggagaatcgcttgaacctgggaagtggaggttgagtgagccgggaccgtgccattgtactccagcctgggtgacagagcgagattccgtctcaaaaaaaaaaaaaaaaagcccacctgaaagcctgtctctttccactttgttggcccttccagtgggattatcgagcatgttgttttttcatagtgcctttttccttatttcaagggttgcttctgagtggtgttttttttttttttttaatttgttttgttttaaaataagttaaaggcagtccagagcttttcagccaatttgtctcctactctgtgtaaatatttttccctccgggcaggggagccagggtagagcaaaggagacaaagcaggagtggaaggtgaggcgttctcctgcttgtactaagccaggaggctttaagctccagctttaagggttgtgagccccttgggggttcagggaactgcttgcccagggtgcagtgtgagtgtgatgggccaccggggcaagagggaaggtgaccgcccagctctcccacatcccactggatctggcttacaggggggtcggaagcctgtcctcaccgtctcgggggttgtggcccccgccccctccctatatgcacccctggaaccagcaagtcccagacaaggagagcggaggaggaagtcatgggaacgcagcctccagttgtagcaggtttcactattcctatgctggggtacacagtgagagtactcacttttcacttgtcttgctcttagattgggccatggctttcatcctgtgtcccctgacctgtccaggtgagtgtgagggcagcactgggaagctggagtgctgcttgtgcctcccttcccagtgggctgtgttgactgctgctccccacccctaccgatggtcccaggaagcagggagagttggggaaggcaagattggaaagacaggaagaccaaggcctcggcagaactctctgtcttctctccacttctggtcccctgtggtgatgtgcctgtaatctttttctccacccaaaccccttcccacgacaaaaacaagactgcctccctctcttccgggagctggtgacagccttgggcctttcagtcccaaagcggccgatgggagtctccctccgactccagatatgaacagggcccaggcctggagcgtttgctgtgccaggaggcggcagctcttctgggcagagcctgtccccgccttccctcactcttcctcatcctgcttctcttttcctcgcagatgataaaaggaatctggcattctacacctggaccatttgattgttttattttggaattggtgtatatcatgaagccttgctgaactaagttttgtgtgtatatatttaaaaaaaaaatcagtgtttaaataaagacctatgtacttaatcctttaactctgcggatagcatttggtaggtagtgattaactgtgaataataaatacacaatgaattcttca

SEQ ID NO: 30 - DNA, 1651 bp, Homo sapiens
acagcagttacactgcggcgggcgtctgttctagtgtttgagccgtcgtgcttcaccggtctacctcgctagcatgtcgggccgcggcaagactggcggcaaggcccgcgccaaggccaagtcgcgctcgtcgcgcgccggcctccagttcccagtgggccgtgtacaccggctgctgcggaagggccactacgccgagcgcgttggcgccggcgcgccagtgtacctggcggcagtgctggagtacctcaccgctgagatcctggagctggcgggcaatgcggcccgcgacaacaagaagacgcgaatcatcccccgccacctgcagctggccatccgcaacgacgaggagctcaacaagctgctgggcggcgtgacgatcgcccagggaggcgtcctgcccaacatccaggccgtgctgctgcccaagaagaccagcgccaccgtggggccgaaggcgccctcgggcggcaagaaggccacccaggcctcccaggagtactaagagggcccgcgccgcggccggccgccaggcctccccatgccaccacaaaggcccttttaagggccaccaccgccctcatggaaagagctgagccgcttcagactgcggggcaagcgggccgcggctcccttcccctcccctcccctcgcccgccttcgccgcccggcctcgagtccccgcccgcccccgctcccgtcccgcaccgcctgccgcgtcggcctcgggccctgccctgtccgccgtccgccctccggtagggttcgggccttccggatgcggcttgggcgctcttcggggacctccgtggcgcggaagacccgagcctgccggggggaggccggcggcgccgcacctgcccgcctcggcgttcgtgactcagccgccccatcccgagtcgctaaggggctgcggggaggccgcagcaccttctggaagacttggccttccgctctgacgcagggccgaggtgggcagtccaggccgagaggccggcggccctgaaggtgagtgaggccctcggcagctgcagccggggtgtctggtacccccccggcgtggtgcttagcccaggactttcagacgcggccgctggccgggaggctttggtgggagagacgcgatcgccgatttcggtctggcgccccttctgcggccgggacccaggcctttcacatcagctctccctccatcttcattcataggtctgcgctggggccgggacgaagcacttggtaacaggcacatcttcctcccgagtgactgcctcctaggaggacatttaggggagggcagaggcctgcagtttggcttcacggctggctatgtggacagcaagagtcgttttcgcggaagccgactggcagccaggcctgtcgggccccccgacgccgccccatttcccttccagcaaactcaactcggcaatccaagcacctagataccagcacaagtcggttaatccctgtctggactgagcctccgttggcttctgaactggaattctgcagctaacccttccacgactagaaccttaggcattggggagttttagatggactaattttattaaaggattgttttttttttaaaaaaaaaaaaaaaaaaaaaaaaaaaaaaaaaaaaaaaaaaaaaaaaaaaaaaaaaaaa

SEQ ID NO: 31 - DNA, 2091 bp, Homo sapiens
gagcggagccgcgggcgggagggcggacggaccgactgacggtagggacgggaggcgagcaagatggcgcagacgcagggcacccggaggaaagtctgttactactacgacggggatgttggaaattactattatggacaaggccacccaatgaagcctcaccgaatccgcatgactcataatttgctgctcaactatggtctctaccgaaaaatggaaatctatcgccctcacaaagccaatgctgaggagatgaccaagtaccacagcgatgactacattaaattcttgcgctccatccgtccagataacatgtcggagtacagcaagcagatgcagagattcaacgttggtgaggactgtccagtattcgatggcctgtttgagttctgtcagttgtctactggtggttctgtggcaagtgctgtgaaacttaataagcagcagacggacatcgctgtgaattgggctgggggcctgcaccatgcaaagaagtccgaggcatctggcttctgttacgtcaatgatatcgtcttggccatcctggaactgctaaagtatcaccagagggtgctgtacattgacattgatattcaccatggtgacggcgtggaagaggccttctacaccacggaccgggtcatgactgtgtcctttcataagtatggagagtacttcccaggaactggggacctacgggatatcggggctggcaaaggcaagtattatgctgttaactacccgctccgagacgggattgatgacgagtcctatgaggccattttcaagccggtcatgtccaaagtaatggagatgttccagcctagtgcggtggtcttacagtgtggctcagactccctatctggggatcggttaggttgcttcaatctaactatcaaaggacacgccaagtgtgtggaatttgtcaagagctttaacctgcctatgctgatgctgggaggcggtggttacaccattcgtaacgttgcccggtgctggacatatgagacagctgtggccctggatacggagatccctaatgagcttccatacaatgactactttgaatactttggaccagatttcaagctccacatcagtccttccaatatgactaaccagaacacgaatgagtacctggagaagatcaaacagcgactgtttgagaaccttagaatgctgccgcacgcacctggggtccaaatgcaggcgattcctgaggacgccatccctgaggagagtggcgatgaggacgaagacgaccctgacaagcgcatctcgatctgctcctctgacaaacgaattgcctgtgaggaagagttctccgattctgaagaggagggagaggggggccgcaagaactcttccaacttcaaaaaagccaagagagtcaaaacagaggatgaaaaagagaaagacccagaggagaagaaagaagtcaccgaagaggagaaaaccaaggaggagaagccagaagccaaaggggtcaaggaggaggtcaagttggcctgaatggacctctccagctctggcttcctgctgagtccctcacgtttcttccccaacccctcagattttatattttctatttctctgtgtatttatataaaaatttattaaatataaatatccccagggacagaaaccaaggccccgagctcagggcagctgtgctgggtgagctcttccaggagccaccttgccacccattcttcccgttcttaactttgaaccataaagggtgccaggtctgggtgaaagggatacttttatgcaaccataagacaaactcctgaaatgccaagtgcctgcttagtagctttggaaaggtgcccttattgaacattctagaaggggtggctgggtcttcaaggatctcctgtttttttcaggctcctaaagtaacatcagccatttttagattggttctgttttcgtaccttcccactggcctcaagtgagccaagaaacactgcctgccctctgtctgtcttctcctaattctgcaggtggaggttgctagtctagtttcctttttgagatactattttcatttttgtgagcctctttgtaataaaatggtacatttct

SEQ ID NO: 32 - DNA, 6656 bp, Homo sapiens
agtggatgcgctcacctccctgcggcctcctgaggtggtttggtggccccctcctcgcgagttggtgccgctgccacctccgattccgagctttcggcacctctgccgggtggtaccgagccttcccggcgccccctcctctcctcccaccggcctgcccttccccgcgggactatcgcccccacgtttccctcagcccttttctctcccggccgagccgcggcggcagcagcagcagcagcagcagcaggaggaggagcccggtggcggcggtggccggggagcccatggcgtacagtcaaggaggcggcaaaaaaaaagtctgctactactacgacggtgatattggaaattattattatggacagggtcatcccatgaagcctcatagaatccgcatgacccataacttgctgttaaattatggcttatacagaaaaatggaaatatataggccccataaagccactgccgaagaaatgacaaaatatcacagtgatgagtatatcaaatttctacggtcaataagaccagataacatgtctgagtatagtaagcagatgcagagatttaatgttggagaagattgtccagtgtttgatggactctttgagttttgtcagctctcaactggcggttcagttgctggagctgtgaagttaaaccgacaacagactgatatggctgttaattgggctggaggattacatcatgctaagaaatcagaagcatcaggattctgttacgttaatgatattgtgcttgccatccttgaattactaaagtatcatcagagagtcttatatattgatatagatattcatcatggtgatggtgttgaagaagctttttatacaacagatcgtgtaatgacggtatcattccataaatatggggaatactttcctggcacaggagacttgagggatattggtgctggaaaaggcaaatactatgctgtcaattttccaatgagagatggtatagatgatgagtcatatgggcagatatttaagcctattatctcaaaggtgatggagatgtatcaacctagtgctgtggtattacagtgtggtgcagactcattatctggtgatagactgggttgtttcaatctaacagtcaaaggtcatgctaaatgtgtagaagttgtaaaaacttttaacttaccattactgatgcttggaggaggtggctacacaatccgtaatgttgctcgatgttggacatatgagactgcagttgcccttgattgtgagattcccaatgagttgccatataatgattactttgagtattttggaccagacttcaaactgcatattagtccttcaaacatgacaaaccagaacactccagaatatatggaaaagataaaacagcgtttgtttgaaaatttgcgcatgttacctcatgcacctggtgtccagatgcaagctattccagaagatgctgttcatgaagacagtggagatgaagatggagaagatccagacaagagaatttctattcgagcatcagacaagcggatagcttgtgatgaagaattctcagattctgaggatgaaggagaaggaggtcgaagaaatgtggctgatcataagaaaggagcaaagaaagctagaattgaagaagataagaaagaaacagaggacaaaaaaacagacgttaaggaagaagataaatccaaggacaacagtggtgaaaaaacagataccaaaggaaccaaatcagaacagctcagcaacccctgaatttgacagtctcaccaatttcagaaaatcattaaaaagaaaatattgaaaggaaaatgttttctttttgaagacttctggcttcattttatactactttggcatggactgtatttattttcaaatggctttttcgtttttgtttttcttggcaagttttattgtgagtttttctaattatgaagcaaaatttcttttctccaccatgctttatgtgatagtatttaaaattgatgtgagttattatgtcaaaaaaactgatctattaaagaagtaattggcctttctgagctgatttttccatcttttgtaattatctttattaaaaaattgtacttggattatcttttgtctgtttattactacaatatgaagtcttgtttcagtggctaatgacatcatttctgtagacttacaatacactctaggtgaaagataatgattacagcttgaaagataactatttgctgtttctttgggaagagtatttatagtaattattacttatctttgcaatagaaattctaccaccttgccctctatagcttagccagttagtatcagtgaagattaacatcccattacaatttatgaaataatacagactctgcaattgagatgtaggagttctttgagttgacccaaagattctcaaaattgaaatggaaattctgaattgaaagaagaaactgaccagaacttgtattgaccagacttgcctatagtatattgctggtttaaaatggaacctgcagacaaaacctgtttcttttactgcatttacatggcatccaggttccattattatttacgtgacatccaggtttctaactcaaggaaataaacacaactgatttatcattcagcaactacttattgtgtgtctgcccattttaagactgtaggagtgtaactgaatataatggaaaaatgctttcactcagagcttacactcagagcttacattctagtagcaggaagcagacaaatgggggtaactcctgctactaagatgtgcaaagaagacaaaacattttaggaacttgccaaaatcagtgaaatctccctttttgtcaggcccacattgattcttttgagattaaaaattacagaatgccagaagataattcagtcaaaagtatttctcttcagtgcagtaaaatattaaaagaaaaaatatttctctacaagcctcttaaatgtttcagacattcacaatagcacctagacttttgtaatgaacagctgtgcacccaccccgacttaacaaatattttacttttgctatatttgcttcggtgtttttttcttaaaatacaccgaaattgaagctctctttgtgtactttgtcgtttgtaatcctccctccctcccagccttaagaagtaatcaccattgtgattattttatccatgtttttgtgaatattttacccatgtttttgtacttttgctacatatttgttatcaatctgtaaacctttatgacattaggaactaagaaacttagtcccttcgttagggggataatgaaatgtatttagtgtttgtgaaacatagatggtatgtatttggacaattctgtaactttgctttttttatttttatttttccatagcttattggggaacaggtggtgtttggttacatgattaagttctttagtggtgatttgtgggattttggtggacccatcacccaagcagtgtacactgcaccctatttgtaatcttttatccctcgcccccctcccaccatgcctcccgtctaccatgatgatcctgttttaaataagaaaataccatttcgcaggctccagatgttctggcatcctccctgtggatttcccagtgcctgcagctcacaggacaacaggggctgtggtagagtcacctatgagatcctggagtagtggatggaggagatggaacagtgaagacggaaactgagctcagtatccgggtgccaggagacaaaggccctttgctttttttcatttaatattctgatctacccctgttgacacatgttaagtatagttcattttgactgctatgtattatgttccattgtgtgaacatactgaaattgtacacttcaatactatactggatctccttgggtgtatttaagaggttttgtttttctaagtagttggttatatacaactaaaacctcaagagaactatctaaagcaatttcagcaaggtgatttggtacagcattaataaacagaaatcagtaacacttagtgaccaagtctgttggaagaacaaagacccccatttgtaataacaaaatttttagaaataatatgtaaagaagctatggttcttgtgtctagtaaggtcaatgtaacatagtaagatgtcagaataccctaatactttaaaaaattcatataggataaaaatgatatttgaaattggcaaggaaagacattattttgtaagtggaattgggacaacaactggtaaccaaatggaaaacccagttttctgccctccactagaagatttaaataggaaaagataaaactaccaaaaacctaaactcttaaagcaaatggattgaagaaggcctaagtgtgacaccaaactcaactataaaagatatatttgataacaaaaaaaaaattagttcagtggaccaacaaaaacttagaagacaagtcaagaaaaatgacaaaagacagagtgggaggcagatttgtaactcatccaggtcaaaaggctcatatctaaagatagtagaggaacaaaatgtataaggatgtgaactgggaaacaaatacatataaatagtttgtaaatatgaaaagatctttaacctcagtaaataaaaagctatagagagacttattttttaacttagttttttaaacctattatgtttatttattttttctttttttgagacggagtctcgctgttgcccaggctggtgtgcaatggcgcaatctcggctcactgcaacctccgcctcccaggttgaagccattctcctgcctcagcctcctgagtagctgggattacaggcgcctgtcaccacgcccagctaattgttcgcatttttagtagagacggggtttcactatgttggccaggctggcctcgaactcctgacctcatgatccacccaccttggccttccaaagtgctgggattacaggtgtgagctgccgcacctggctgtttatctcttttttttagagaaaggatctcggtcacccaggatggagtgtggtagcctgatcatatctcactacatcttagaacttctaggcttagggtattctcccacctcagcctcccaagtagctgggactacaagtgtgcaccatcacacctagctgatttttacatttttattttggagagatggtgtctccctgtgttgcccaggctggtcacaaactcctaggctcaagcgattctcctgactcaggcatgagccaccgtacccggcctaaacctatcatgttacagacttagaaagcaactattgtcaagtgtttgaggaaactcaggtcaggtttggtaaactaagatattaactcaagtaaagctctttaattcatttaatgaaggtgccacattgtctcagttctctatggcatgggtgaatgctgttctaagtcagcattggtactctaagctagttacatcatatctaagctttgcccttctaccagagctgctagcattctgtcaatgggcaattatttgaagttcttacattgaagttagtcacctacatcttctgttttttatggttttgatgtagtaatactgctgaagtttttttgataactgcgattcataatatttgttattcatattgtgatataaatgataagggcttttgaaaacaagtagtaatcatttcaatagcttaggatctccaccataatcttaggaaaattactaacctctgtgcctcagttgcttcatcatttaaaatgaggaaaataatagtccctacttaataggtttgttgtgaggattgagttaataacatagttaatgctcagtaagggttagctgctatttttttttcttttttttttgaaagagtctcactctgttgcccaggttggagtgcagtggcatgatcttggctcactgcatcctctgcttcctaggttcaggtgattctcatgcttcagcctcccaagcagctgggagtacaggtgtgcaccaccacacctggctaatttttgtatatttagtagagacgggttctcaccatattgtccaggctggtcttgaactccttacctcaaatgatccacccgcctgggcctcccaaagtgctgggattacaagcatgagccaccgcgcctggcttgctattgttatgaggtaaaggtagatagatgggtgagagtggtgccaggggaagtgttaaatttttgagtgttcctttagatgccagatgggttgtatctgagccttttattgcagtttgatgcctactagtgtgaagactactaggtcatagtggatagagaagcaatcttttggagacctgattttagcaaggatacgaataatatttgacaactttggggggatcttgatgcctctgtaatttactcaaggataatctcaagaaaaatggcattaagtagattacagaaaaaatagaactatcatattgttattattggctatttacatgagcaatgcggagaaatgtttaggattacagcatttagaagcttctcaattgctgcatttcctcactgtaccacaagatggcagatactgcatttaaaatttttttttctgtgtgttttctcttatagtcacttggtggccatgtaacaagcagagcaacatgtattaacagattctttttgaatgcaatattggattaaaaactttgaattaaactacaa

SEQ ID NO: 33 - DNA, 1584 bp, Homo sapiens
gttggttggagcgtcgcgcagtcgggaggtccgggaaagtttctttggaggtccggcccggagcggccatgtcccacggccccaagcagcccggcgcggccgccgcgccggcgggcggcaaggctccgggccagcatgggggcttcgtggtgactgtcaagcaagagcgcggcgagggtccacgcgcgggcgagaaggggtcccacgaggaggagccggtgaagaaacgcggctggcccaagggcaagaagcggaagaagattctgccgaatgggcccaaggcaccggtcacgggctacgtgcgcttcctgaacgagcggcgcgagcagatccgcacgcgccacccggatctgccctttcccgagatcaccaagatgctgggcgccgagtggagcaagctgcagccaacggaaaagcagcggtacctggatgaggccgagagagagaagcagcagtacatgaaggagctgcgggcgtaccagcagtctgaagcctataagatgtgcacggagaagatccaggagaagaagatcaagaaagaagactcgagctctgggctcatgaacactctcctgaatggacacaagggtggggactgcgatggcttctccaccttcgatgttcccatcttcactgaagagttcttggaccaaaacaaagcgcgtgaggcggagcttcggcgcttgcggaagatgaatgtggccttcgaggagcagaacgcggtactgcagaggcacacgcagagcatgagcagcgcgcgcgagcgtctggagcaggagctggcgctggaggagcggaggacgctggcgctgcagcagcagctccaggccgtgcgccaggcgctcaccgccagcttcgcctcactgccggtgccgggcacgggcgaaacgcccacgctgggcactctggacttctacatggcccggcttcacggagccatcgagcgcgaccccgcccagcacgagaagctcatcgtccgcatcaaggaaatcctggcccaggtcgccagcgagcacctgtgaggagtgggcgggcccacgatgcagaggagaagctgtgggcgcggccctgccacaccccaccccgtggacgagaggctgggggtccaccctttggggcctggtcccatcctgcaccttgggggctccagcccccctaaaattaaatttctgcagcatccctttagctttcaatctccccagccccctgaacccggaaaaagcactcgctgcgcgatacacccagaagaacctcacagccgagggtgcccctcctcggaggacagccacgcgctacactggctctccgggccacccccaggacacagggcagacgaaacccacccccagcacacggcaggaccccccaaattactcactacggggggctgtgccataggccacacaggaagctgccttgtggggacttacctggggtgtcccccgcatgcctgtaccccagatgggtgggggccggctttgcccatcctgctctcctccagccgagggaccctggtgggggtggctccttctcactgctggatccggactttttaaataaaaacaagtaaaatttgtgttttaa

SEQ ID NO: 34 - DNA, 4824 bp, Homo sapiens
gcggaaaagaggccgtggggggcctcccagcgctggcagacaccgtgaggctggcagccgccggcacgcacacctagtccgcagtcccgaggaacatgtccgcagccagggcgcggagcagagtcccgggcaggagaaccaagggagggcgtgtgctgtggcggcggcggcagcggcagcggagccgctagtcccctccctcctgggggagcagctgccgccgctgccgccgccgccaccaccatcagcgcgcggggcccggccagagcgagccgggcgagcggcgcgctagggggagggcgggggcggggaggggggtgggcgaagggggcgggagggcgtggggggagggtctcgctctcccgactaccagagcccgagagggagaccctggcggcggcggcggcgcctgacactcggcgcctcctgccgtgctccggggcggcatgtccgaggctggcggggccgggccgggcggctgcggggcaggagccggggcaggggccgggcccggggcgctgcccccgcagcctgcggcgcttccgcccgcgcccccgcagggctccccctgcgccgctgccgccgggggctcgggcgcctgcggtccggcgacggcagtggctgcagcgggcacggccgaaggaccgggaggcggtggctcggcccgaatcgccgtgaagaaagcgcaactacgctccgctccgcgggccaagaaactggagaaactcggagtgtactccgcctgcaaggccgaggagtcttgtaaatgtaatggctggaaaaaccctaacccctcacccactccccccagagccgacctgcagcaaataattgtcagtctaacagaatcctgtcggagttgtagccatgccctagctgctcatgtttcccacctggagaatgtgtcagaggaagaaatgaacagactcctgggaatagtattggatgtggaatatctctttacctgtgtccacaaggaagaagatgcagataccaaacaagtttatttctatctatttaagctcttgagaaagtctattttacaaagaggaaaacctgtggttgaaggctctttggaaaagaaacccccatttgaaaaacctagcattgaacagggtgtgaataactttgtgcagtacaaatttagtcacctgccagcaaaagaaaggcaaacaatagttgagttggcaaaaatgttcctaaaccgcatcaactattggcatctggaggcaccatctcaacgaagactgcgatctcccaatgatgatatttctggatacaaagagaactacacaaggtggctgtgttactgcaacgtgccacagttctgcgacagtctacctcggtacgaaaccacacaggtgtttgggagaacattgcttcgctcggtcttcactgttatgaggcgacaactcctggaacaagcaagacaggaaaaagataaactgcctcttgaaaaacgaactctaatcctcactcatttcccaaaatttctgtccatgctagaagaagaagtatatagtcaaaactctcccatctgggatcaggattttctctcagcctcttccagaaccagccagctaggcatccaaacagttatcaatccacctcctgtggctgggacaatttcatacaattcaacctcatcttcccttgagcagccaaacgcagggagcagcagtcctgcctgcaaagcctcttctggacttgaggcaaacccaggagaaaagaggaaaatgactgattctcatgttctggaggaggccaagaaaccccgagttatgggggatattccgatggaattaatcaacgaggttatgtctaccatcacggaccctgcagcaatgcttggaccagagaccaattttctgtcagcacactcggccagggatgaggcggcaaggttggaagagcgcaggggtgtaattgaatttcacgtggttggcaattccctcaaccagaaaccaaacaagaagatcctgatgtggctggttggcctacagaacgttttctcccaccagctgccccgaatgccaaaagaatacatcacacggctcgtctttgacccgaaacacaaaacccttgctttaattaaagatggccgtgttattggtggtatctgtttccgtatgttcccatctcaaggattcacagagattgtcttctgtgctgtaacctcaaatgagcaagtcaagggctatggaacacacctgatgaatcatttgaaagaatatcacataaagcatgacatcctgaacttcctcacatatgcagatgaatatgcaattggatactttaagaaacagggtttctccaaagaaattaaaatacctaaaaccaaatatgttggctatatcaaggattatgaaggagccactttaatgggatgtgagctaaatccacggatcccgtacacagaattttctgtcatcattaaaaagcagaaggagataattaaaaaactgattgaaagaaaacaggcacaaattcgaaaagtttaccctggactttcatgttttaaagatggagttcgacagattcctatagaaagcattcctggaattagagagacaggctggaaaccgagtggaaaagagaaaagtaaagagcccagagaccctgaccagctttacagcacgctcaagagcatcctccagcaggtgaagagccatcaaagcgcttggcccttcatggaacctgtgaagagaacagaagctccaggatattatgaagttataaggttccccatggatctgaaaaccatgagtgaacgcctcaagaataggtactacgtgtctaagaaattattcatggcagacttacagcgagtctttaccaattgcaaagagtacaacccccctgagagtgaatactacaaatgtgccaatatcctggagaaattcttcttcagtaaaattaaggaagctggattaattgacaagtgattttttttcccctctgcttcttagaaactcaccaagcagtgtgcctaaagcaaggtggtttagttttttacaaagaattggacatgatgtattgaagagacttgtaaatgtaataattagcacttttgaaaaaacaaaaaacctccttttagcttttcagatatgtatttaaattgaagtcataggacatttttattttatggaatagattttaatctatttactactattaaggtaaattttctatggcatgtccattagctatttcatgatagatgattaggggtttcctcaaaacctgtgtgtgaggaaattgcacacagtagcaaaatttggggaaatccataacattttcagaccatgaatgaatgtttccatttttttctaatggaatgtgagagtttacttttattttattctgaaggactttaaggaagggatacatgattttaaaaaagcctgtaagaggtgaaatatgtgatgtttgaagtctctttatagactttttatatatattttttaaaacactcatctagatgaggtgctttgagcagttctgaaaaatgcagttccaggaaagcaactgctttggttcctaaggaagaaattctaaataatgcaaacttttaaaataagcatctaggtttttgataattctgtctacttacaacaaacttgttagtacataaccactattttaataattattttctctacacaaatgtgtaatatcatatttgactttgcttatgcaggccataagttccaaaagataatttccctgcccacaaaggcataaacttgaaaacacatgagattgaatcaacatgctttaataggaaaagatgtatggtctatatatgtatcaatctggtgaatcctcgttctaataaaggttctttttcttttctatgatacacacagccacgctgataatatgcaaatgaacattttcctttatgtctctccagataatgtttattgtctgaggtaaattaaattcccaccagggtttgctgtcagtattttaacacccacattagtatatgcgtccagggtcataaccccctaaaatccatcatgcaaccttattaatctgtcttgggattccagtttagtgcttggatttatttcctgattacactacatagaaaagtgagacatctgccattcccaactctgggaaaaccaactaatatacaaccatataaatgaaggccatcttgatggtctcaacactaatttttatgatgcaaatttatacactgatttttgtaaaggacaaagttttaaaagcgtatttaacttgatgttttctatcagcataaataaaatggtcatgaatagtcattaaaaacagttgccagtgataatctgcatgaaggaaaaagaaccctgcaaatggctattgagttggaagtattgtttttgatatgtaagagatattcagaatgctcacactgaaaatgcctcaactttttaaagtgtaagaaaccaccatgagtggtgtctagatttctaatgaagaatcatgatacagtttggattaagtatcttggactggttttaaacagtgctttgtaccggatctgctgaagcatctgtccagctggtatcctgtgaaagtttgttattttctgagtagacattcttatagagtattgtctttaaaatcagattgtctcttctatattgaaagcatttttatgttttctaatttaaaaattaatattttcttatagatattgtgcaataaagctgaagtagaatgtgtggtttttgcaaatgctttaacagctgataaaaattttacatttgtaaaattaatatattgtactggtacaaaatagttttaaattatattttaaaaagcttccaa

SEQ ID NO: 35 - DNA, 4504 bp, Homo sapiens
gggcagtccgcactgcaattggttggcgtctccgggacggatttgaaacttggcggttaaagctccggctgggacagggcggcgggaggcccagggagaacggggaagggacatttagtttgagacggtgctgagataggatcatgaaggaagaggtgaagggaattcctgtaagagtggcgctgcgttgtcgccctctggtccccaaagagattagcgagggctgccagatgtgcctttccttcgtgcccggagagcctcaggtggtggttggtacagataaatccttcacctacgattttgtatttgatccctctactgaacaggaagaagtcttcaatacagcagtagcgccactcataaaaggtgtatttaaaggatataatgcaacggtcctggcctatgggcagactggctctggaaaaacctattcaatgggaggtgcatatactgcagagcaagagaatgaaccaacagttggggttattcctagggtaatacaactgctcttcaaagaaattgataaaaagagtgactttgaatttactctgaaagtgtcttacttagagatttacaatgaagaaattttggatcttctatgcccatctcgtgagaaagctcaaataaatatacgagaggatcctaaggaaggcataaagattgtgggactcactgagaagactgttttggttgccttggatactgtttcctgtttggaacagggcaacaactctaggactgtggcctccacggctatgaactcccagtcgtcccgatctcatgccatctttacaatctccttagagcaaagaaagaaaagtgacaagaatagcagctttcgctccaagctgcatcttgtagacctcgctggatcagaaagacagaagaaaaccaaggctgaaggggatcgtctaaaagagggtattaatattaaccgaggcctcctatgcttgggaaatgtaatcagtgctcttggagatgacaaaaagggtggctttgtgccctacagagattccaagttgactcgactgcttcaagattctctaggaggtaatagccatactcttatgatagcctgtgtgagtcctgctgactccaatctagaggaaacattaaatacccttcgctatgctgacagagcaagaaaaatcaagaacaaacctattgttaatattgatccccagacagctgaacttaatcatctaaagcaacaggtacaacagctacaagtcttgttgctacaggcccatggaggtaccctgcctggatctataactgtggaaccatcagagaatctacaatccctgatggagaagaatcagtccctggtagaggagaatgaaaaattaagtcgtggtctgagcgaggcagctggtcagacagcccagatgttggagaggatcattttgacagagcaagcgaatgaaaaaatgaacgccaagctagaagagctcaggcagcatgcggcctgcaaactggatcttcaaaagctagtggagactttggaagaccaggaattgaaagaaaatgtagagataatttgtaacctgcagcaattgattacccagttatcggatgaaactgttgcttgcatggctgcagccattgatactgcggtggagcaagaagcccaagtagaaaccagtccagagacgagcaggtcttctgacgcttttaccactcagcatgctctccgtcaagcgcagatgtctaaggagctggttgagttgaataaagcgcttgcactgaaagaggccctggctaggaagatgactcagaatgacagccaactgcagcccattcagtaccaataccaggataacataaaagagctagaattagaagtcatcaatctgcaaaaggaaaaggaagaattggttcttgaacttcagacagcaaagaaggatgccaaccaagccaagttgagtgagcgccgccgcaaacgtctccaggagctggagggtcaaattgctgatctgaagaagaaactgaatgagcagtccaaacttctgaaactaaaggaatccacagagcgtactgtctccaaactgaaccaggagatacggatgatgaaaaaccagcgggtacagttaatgcgtcaaatgaaagaagatgctgagaagtttagacagtggaagcagaaaaaagacaaagaagtaatacagttaaaagaacgagaccgtaagaggcaatatgagctgctgaaacttgaaagaaacttccagaaacaatccaatgtgctcagacgtaaaacggaggaggcagcagctgccaacaagcgtctcaaggatgctctccagaaacaacgggaggttgcagataagcggaaagagactcagagccgtggaatggaaggcactgcagctcgagtgaagaattggcttggaaacgaaattgaggttatggtcagtactgaggaagccaaacgccatctgaatgacctccttgaagatagaaagatcctggctcaagatgtggctcaactcaaagaaaaaaaggaatctggggagaatccacctcctaaactccggaggcgtacattctcccttactgaagtgcgtggtcaagtttcggagtcagaagattctattacaaagcagattgaaagcctagagactgaaatggaattcaggagtgctcagattgctgacctacagcagaagctgctggatgcagaaagtgaagacagaccaaaacaacgctgggagaatattgccaccattctggaagccaagtgtgccctgaaatatttgattggagagctggtctcctccaaaatacaggtcagcaaacttgaaagcagcctgaaacagagcaagaccagctgtgctgacatgcagaagatgctgtttgaggaacgaaatcattttgccgagatagagacagagttacaagctgagctggtcagaatggagcaacagcaccaagagaaggtgctgtaccttctcagccagctgcagcaaagccaaatggcagagaagcagttagaggaatcagtcagtgaaaaggaacagcagctgctgagcacactgaagtgtcaggatgaagaacttgagaaaatgcgagaagtgtgtgagcaaaatcagcagcttctccgagagaatgaaatcatcaagcagaaactgaccctcctccaggtagccagcagacagaaacatcttcctaaggatacccttctatctccagactcttcttttgaatatgtcccacctaagccaaaaccttctcgtgttaaagaaaagttcctggagcaaagcatggacatcgaggatctaaaatattgttcagagcattctgtgaatgagcatgaggatggtgatggtgatgatgatgagggggatgacgaggaatggaagccaacaaaattagttaaggtgtccaggaagaacatccaagggtgttcctgcaagggctggtgtggaaacaagcagtgtgggtgcaggaagcaaaagtcagactgtggtgtggactgttgctgtgaccccacaaagtgtcggaaccgccagcaaggcaaggatagcttgggcactgttgaacggacccaggattccgaaggctccttcaaactggaggatcctaccgaggtgaccccaggattgagcttctttaatcccgtctgtgccacccccaatagcaagatcctgaaagagatgtgcgatgtggagcaggtgctgtcaaagaagactcccccagctccctccccttttgacctcccagagttgaaacatgtagcaacagaataccaagaaaacaaggctccagggaagaaaaagaaacgggctctggccagcaacaccagcttcttctctggctgctcccctatcgaagaagaggcccactgaagttggagtcatcatctctacccccagtctggcttgggagatgctttcaggttgcagccagaaggggttttttaaatgacttctctggatttcaggtttcttgctgttgaaaaaaggaacaaagcgttactgaaaagaaggtaacctttgttggatgtgggccttagcctccaggtccagactactactctatgttctccagaagggtgctaagtcacctactgaagagagaaccaactgactttcctattgactcatcaggaaccagtcctcagtctggtcaagttgtttcttatttgtgagcagttcaggctatctcctgatggggatgaggccaaggctttcttatcttttggttgtctctgcttaatggaggagcctggcctaggatggaggcctggcttagatctttcattccacctcaggaatgaggttgtgatctttcctgtcctgaccctctctgaattatgtttcaatagtactcttgattgtctgccatgttgttgaagcaaatgaattatttttaaatgttaagtaagtaaataaaccttagcccgtctactgtttgggaagatccttctgtgctagagggagaaataaaatttcaacctgtgttcctcagcccctgaggaagctattaaggggattcattacaagtaaaa

SEQ ID NO: 36 - DNA, 2074 bp, Homo sapiens
agggggcgatgttcctgggagacaggaaatgcccaggggctgggagaccctctgctcttctgctcccttcctgtgtgctgcctggcaatggggaactctgagggctgcaataccaagaaggagggtgacctgatagctgctcaggctcggctgaaggacctggaggctctgctgaactccaaggaggccgcactgagcactgctctcagtgagaagcgcacgctggagggcgagctgcatgatctgcggggccaggtggccaagcttgaggcagccctaggtgaggccaagaagcaacttcaggatgagatgctgcggcgggtggatgctgagaacaggctgcagaccatgaaggaggaactggacttccagaagaacatctacagtgaggagctgcgtgagaccaagcgccgtcatgagacccgactggtggagattgacaatgggaagcagcgtgagtttgagagccggctggcggatgcgctgcaggaactgcgggcccagcatgaggaccaggtggagcagtataagaaggagctggagaagacttattctgccaagctggacaatgccaggcagtctgctgagaggaacagcaacctggtgggggctgcccacgaggagctgcagcagtcgcgcatccgcatcgacagcctctctgcccagctcagccagctccagaagcagctggcagccaaggaggcgaagcttcgagacctggaggactcactggcccgtgagcgggacaccagccggcggctgctggcggaaaaggagcgggagatggccgagatgcgggcaaggatgcagcagcagctggacgagtaccaggagcttctggacatcaagctggccctggacatggagatccacgcctaccgcaagctcttggagggcgaggaggagaggctacgcctgtcccccagccctacctcgcagcgcagccgtggccgtgcttcctctcactcatcccagacacagggtgggggcagcgtcaccaaaaagcgcaaactggagtccactgagagccgcagcagcttctcacagcacgcacgcactagcgggcgcgtggccgtggaggaggtggatgaggagggcaagtttgtccggctgcgcaacaagtccaatgaggaccagtccatgggcaattggcagatcaagcgccagaatggagatgatcccttgctgacttaccggttcccaccaaagttcaccctgaaggctgggcaggtggtgacgatctgggctgcaggagctggggccacccacagcccccctaccgacctggtgtggaaggcacagaacacctggggctgcgggaacagcctgcgtacggctctcatcaactccactggggaagaagtggccatgcgcaagctggtgcgctcagtgactgtggttgaggacgacgaggatgaggatggagatgacctgctccatcaccaccacggctcccactgcagcagctcgggggaccccgctgagtacaacctgcgctcgcgcaccgtgctgtgcgggacctgcgggcagcctgccgacaaggcatctgccagcggctcaggagcccaggtgggcggacccatctcctctggctcttctgcctccagtgtcacggtcactcgcagctaccgcagtgtggggggcagtgggggtggcagcttcggggacaatctggtcacccgctcctacctcctgggcaactccagcccccgaacccagagcccccagaactgcagcatcatacaagagatgggaatgaggtgggaggtggaagaagggagaagaaaggtgagtttgagctgccttccctagctttagaccctgggtgggctctgtgcagtcactggaggttgaagccaagtggggtgctgggaggagggagagggaggtcactggaaaggggagagcctgctggcacccaccgtggaggaggaaggcaagagggggtggaggggtgtggcagtggttttggcaaacgctaaagagcccttgcctccccatttcccatctgcaccccttctctcctccccaaatcaatacactagttgtttctacccctggcaaaaaaaaaaaa

SEQ ID NO: 37 - DNA, 3773 bp, Homo sapiens
gcatgcccagtgcccgcgcgcgccgccaggctcgcaagcaccgcgtaggccagctggccggatcccgccgtctgtcatggcggcccccatcctgaaagatgtagtggcctatgttgaagtgtggtcatccaatggaacagaaaattattcaaagacatttacaacacagcttgtggatatgggggcaaaggtttcaaaaacttttaacaaacaagtaactcacgttatcttcaaagatggctaccagagcacttgggacaaagctcagaagagaggcgtaaagctcgtttcggtgctctgggtggaaaaatgcaggacagctggagcacacattgatgaatcattgttccctgcagctaatatgaatgaacacttatcaagcctaattaaaaaaaaacgtaaatgtatgcagcccaaagattttaattttaaaacaccagaaaatgataagagatttcagaagaaatttgagaaaatggctaaagagctacaaaggcaaaaaacaaatctagatgatgatgtacctattctcttatttgaatctaatggttcattaatatatactcccacaattgaaattaatagtagtcaccacagcgcaatggagaagagattacaagagatgaaggagaaaagggaaaatctttcccccacctcttcccaaatgattcagcagtctcatgataatccaagtaactctctgtgtgaagcacctttgaacatttcacgtgatactttgtgttcagatgaatactttgctggtggcttacactcatcttttgatgatctttgtggaaactcaggatgtggaaatcaggaaaggaagttggaaggatccattaatgacattaaaagtgatgtgtgtatttcttcacttgtattgaaagcaaataatattcattcatcaccatctttcactcacctcgataaatcaagtcctcagaaatttctgagtaatctttcaaaggaagaaataaacttgcaaagaaatattgcaggtaaagtagtcacccctgaccaaaagcaggctgcaggtatgtctcaggagacgtttgaagagaagtatcgtttgtctcctaccttatcttcaacaaaaggccaccttttgatacattcaagacccaggagttcctcagtaaagagaaaaagagtatcacatggctcccattcacctccgaaggaaaaatgcaagagaaagaggagcaccaggagatctatcatgccgaggctgcagctgtgcaggtcggaagacaggctgcagcacgtggcgggacctgccctggaggctcttagctgtggggagtcttcatatgatgactatttttcacctgataatcttaaggaaaggtattcagagaatcttcctcctgaatctcagctgccatcaagccctgctcagttgagctgcagaagtctttctaagaaggagagaacaagcatatttgaaatgtctgatttttcctgcgttggcaaaaaaaccagaacagttgacattaccaatttcacagcaaaaaccatctccagtcctcggaaaactggaaatggtgaaggccgtgcaacttcgagttgcgtgacttctgcccctgaagaagccctaaggtgttgtagacaggctgggaaagaagacgcatgcccagagggaaatggcttttcttacaccattgaggaccctgctcttccaaaaggacatgatgatgatttaactcctttggaaggaagccttgaagaaatgaaagaagcggttggtctgaaaagcacacagaacaaaggtaccacttccaaaatatcaaactcctctgaaggcgaagcccagagtgaacatgagccatgttttatagttgactgtaacatggagacgtctacagaagagaaggaaaacttacccggaggatacagtggaagtatgtgaatctccttttccaagtcaccttcgctaaataaacatgtaacagtgcatccatattttaaatttatcacaactttttcataacttatttccccatttactcctctttttacttaaagaatgtgcatttgatcattccaatgataaactctttaggaatagatgacttgctgtcttgtggaacttctagacttattggttaagtctgttaggaatctatttctccaagacttttccttcttataggtcaaaaggataagtagtccatagtatgaataactgaggggagtgaagtctttttccttattccattggagtcttggcgctgcagcgtgtgtaaagatgtatacgatagagagttttttaaaacctaggttcttaatagtgaggctatttaaagaaagaaattaaggtagattaagccatcgattgtatcatagagaaagtgtgaaaaactacttttagaaatctgttgtcaatattgatttttgaagaaactttggtcagtgttaactatgaagaaacatttaaacatttttgatcatttgtaacaagccttgtttaacttgtacttattttgcttgaagcatcacttgaaaaggtttactcctattcataatttaattgtaattataataaaccatatcattttattaaaagtcaaaacaataaaaaattttgcacttcacagttataagcacaaataggttccagcaaccaaaattgaagaaatcttgaactttgaccgtctttacctaaagattaggttaaaatttgagtgagaacgcattctctctgcatgatttctctgctctacaaatgttttaactgcctctttgaaggtggagaagtcatggtagcgtttgaaatcatcacagacatgttacataccttttccttgagtatacgctccccaaaattgtttcacaaaaagaatgaaaataattttatgtttttggcctgctatttatatcttggctttctgaacatatattaaatttgacaagaaactgtattttatgttccattagccttagtatgtgttttcaaaatatttattttaaaatgttgactcaaaagttaatataaaacaatagatgtgtaaaattctttggtagttaagaatatcctgttctgaggtttacattctccatctttccagttttcaccttgtgtattttttaagcttttgaataataatgacatggaaatgtaaattaagtaggaaaaagctggtagcaaacagtgtggcatggcctaaaatccccgtgttgctgggagtgtgctagtcctcggaagcaggtgtgttatgttctagaacactgcccccctgcgtcgacagcctccggggttgggggtaagtagaagggggtgaggggccagcactagttgactcaaggcaccctggtggggacggagaggttttttcgctcagtggtgcaggccatcaggcaggggtgtccaggcagggcccgggtgcaagaaaacattctgtgtgcgctagtgcgagaggatcttctacagtcacctgccttcatgccattacagacagacgggaagtcactgggttctaggacataaaaagacctacatgttggctagcctaaatcgaacccttttatagtaataaagattcatcaatgttttaaactgtccactgtcagccccctgggactcaggtgaaccaactctctttgggaatctatcttagaagatgaaaccataaagccttcagtttcaatgtcagggatgcacactctatatctggtgaaattatggaggggtgaaaacttctgtacagcaaactgtacctccaaatctttaatgtcgaaataaagggctttttgccatttctgttttcagttca

SEQ ID NO: 38 - DNA, 1265 bp, Homo sapiens
ctcggccccgcccccgcgccccggatatgctgggacagcccgcgcccctagaacgctttgcgtcccgacgcccgcaggtcctcgcggtgcgcaccgtttgcgacttggtacttggaaaaatggacaaggattgtgaaatgaaacgcaccacactggacagccctttggggaagctggagctgtctggttgtgagcagggtctgcacgaaataaagctcctgggcaaggggacgtctgcagctgatgccgtggaggtcccagcccccgctgcggttctcggaggtccggagcccctgatgcagtgcacagcctggctgaatgcctatttccaccagcccgaggctatcgaagagttccccgtgccggctcttcaccatcccgttttccagcaagagtcgttcaccagacaggtgttatggaagctgctgaaggttgtgaaattcggagaagtgatttcttaccagcaattagcagccctggcaggcaaccccaaagccgcgcgagcagtgggaggagcaatgagaggcaatcctgtccccatcctcatcccgtgccacagagtggtctgcagcagcggagccgtgggcaactactccggaggactggccgtgaaggaatggcttctggcccatgaaggccaccggttggggaagccaggcttgggagggagctcaggtctggcaggggcctggctcaagggagcgggagctacctcgggctccccgcctgctggccgaaactgagtatgtgcagtaggatggatgtttgagcgacacacacgtgtaacactgcatcggatgcggggcgtggaggcaccgctgtattaaaggaagtggcagtgtcctgggaacaagcgtgtctgccctttctgtttccatattttacagcaggatgagttcagacgcccgcggtcctgcacacatttgtttccttctctaacgctgcccttgctctatttttcatgtccattaaaacaggccaagtgagtgtggaaggcctggctcatgttgggccacagcccaggatggggcagtctggcaccctcaggccacagacggctgccatagccgctgtccagggccagctaaggcccatcccaggccgtccacactagaaagctggccctgccccatccccaccatgcctcccttcctggctgtgtccatggctgtgatggcattctccactcagcagttcctagcatcccacacccaggtctcactgaaagaaaggggaacaggccatggcagtcagtgcttacagag

SEQ ID NO: 39 - DNA, 2662 bp, Homo sapiens
gaagagacccagcaacccacagagttgagaaatttgactggcattcaagctgtccaatcaatagctgccgctgaagggtggggctggatggcgtaagctacagctgaaggaagaacgtgagcacgaggcactgaggtgattggctgaaggcacttccgttgagcatctagacgtttccttggctcttctggcgccaaaatgtcgttcgtggcaggggttattcggcggctggacgagacagtggtgaaccgcatcgcggcgggggaagttatccagcggccagctaatgctatcaaagagatgattgagaactgtttagatgcaaaatccacaagtattcaagtgattgttaaagagggaggcctgaagttgattcagatccaagacaatggcaccgggatcaggaaagaagatctggatattgtatgtgaaaggttcactactagtaaactgcagtcctttgaggatttagccagtatttctacctatggctttcgaggtgaggctttggccagcataagccatgtggctcatgttactattacaacgaaaacagctgatggaaagtgtgcatacagagcaagttactcagatggaaaactgaaagcccctcctaaaccatgtgctggcaatcaagggacccagatcacggtggaggaccttttttacaacatagccacgaggagaaaagctttaaaaaatccaagtgaagaatatgggaaaattttggaagttgttggcaggtattcagtacacaatgcaggcattagtttctcagttaaaaaacaaggagagacagtagctgatgttaggacactacccaatgcctcaaccgtggacaatattcgctccatctttggaaatgctgttagtcgagaactgatagaaattggatgtgaggataaaaccctagccttcaaaatgaatggttacatatccaatgcaaactactcagtgaagaagtgcatcttcttactcttcatcaaccatcgtctggtagaatcaacttccttgagaaaagccatagaaacagtgtatgcagcctatttgcccaaaaacacacacccattcctgtacctcagtttagaaatcagtccccagaatgtggatgttaatgtgcaccccacaaagcatgaagttcacttcctgcacgaggagagcatcctggagcgggtgcagcagcacatcgagagcaagctcctgggctccaattcctccaggatgtacttcacccagactttgctaccaggacttgctggcccctctggggagatggttaaatccacaacaagtctgacctcgtcttctacttctggaagtagtgataaggtctatgcccaccagatggttcgtacagattcccgggaacagaagcttgatgcatttctgcagcctctgagcaaacccctgtccagtcagccccaggccattgtcacagaggataagacagatatttctagtggcagggctaggcagcaagatgaggagatgcttgaactcccagcccctgctgaagtggctgccaaaaatcagagcttggagggggatacaacaaaggggacttcagaaatgtcagagaagagaggacctacttccagcaaccccagaaagagacatcgggaagattctgatgtggaaatggtggaagatgattcccgaaaggaaatgactgcagcttgtaccccccggagaaggatcattaacctcactagtgttttgagtctccaggaagaaattaatgagcagggacatgaggttctccgggagatgttgcataaccactccttcgtgggctgtgtgaatcctcagtgggccttggcacagcatcaaaccaagttataccttctcaacaccaccaagcttagtgaagaactgttctaccagatactcatttatgattttgccaattttggtgttctcaggttatcggagccagcaccgctctttgaccttgccatgcttgccttagatagtccagagagtggctggacagaggaagatggtcccaaagaaggacttgctgaatacattgttgagtttctgaagaagaaggctgagatgcttgcagactatttctctttggaaattgatgaggaagggaacctgattggattaccccttctgattgacaactatgtgccccctttggagggactgcctatcttcattcttcgactagccactgaggtgaattgggacgaagaaaaggaatgttttgaaagcctcagtaaagaatgcgctatgttctattccatccggaagcagtacatatctgaggagtcgaccctctcaggccagcagagtgaagtgcctggctccattccaaactcctggaagtggactgtggaacacattgtctataaagccttgcgctcacacattctgcctcctaaacatttcacagaagatggaaatatcctgcagcttgctaacctgcctgatctatacaaagtctttgagaggtgttaaatatggttatttatgcactgtgggatgtgttcttctttctctgtattccgatacaaagtgttgtatcaaagtgtgatatacaaagtgtaccaacataagtgttggtagcacttaagacttatacttgccttctgatagtattcctttatacacagtggattgattataaataaatagatgtgtcttaacataa

SEQ ID NO: 40 - DNA, 7911 bp, Homo sapiens
aacaactggtgcgcatgcgcactggtgtctcgcggcctggcgcgccccctccgaagcgcatgctcgtgggcacgcacgagcctcaagatccaaggtgcgcgcgtcggcgtccgaggcggttggtgtcggagaatttgttaagcgggactccaggcaattatttccagtcagagaaggaaaccagtgcctggcattctcaccatctttctacctaccatgatcaagtgcttgtcagttgaagtacaagccaaattgcgttctggtttggccataagctccttgggccaatgtgttgaggaacttgccctcaacagtattgatgctgaagcaaaatgtgtggctgtcagggtgaatatggaaaccttccaagttcaagtgatagacaatggatttgggatggggagtgatgatgtagagaaagtgggaaatcgttatttcaccagtaaatgccactcggtacaggacttggagaatccaaggttttatggtttccgaggagaggccttggcaaatattgctgacatggccagtgctgtggaaatttcgtccaagaaaaacaggacaatgaaaacttttgtgaaactgtttcagagtggaaaagccctgaaagcttgtgaagctgatgtgactagagcaagcgctgggactactgtaacagtgtataacctattttaccagcttcctgtaaggaggaaatgcatggaccctagactggagtttgagaaggttaggcagagaatagaagctctctcactcatgcacccttccatttctttctctttgagaaatgatgtttctggttccatggttcttcagctccctaaaaccaaagacgtatgttcccgattttgtcaaatttatggattgggaaagtcccaaaagctaagagaaataagttttaaatataaagagtttgagcttagtggctatatcagctctgaagcacattacaacaagaatatgcagtttttgtttgtgaacaaaagactagttttaaggacaaagctacataaactcattgactttttattaaggaaagaaagtattatatgcaagccaaagaatggtcccaccagtaggcaaatgaattcaagtcttcggcaccggtctaccccagaactctatggcatatatgtaattaatgtgcagtgccaattctgtgagtatgatgtgtgcatggagccagccaaaactctgattgaatttcagaactgggacactctcttgttttgcattcaggaaggagtgaaaatgtttttaaagcaagaaaaattatttgtggaattatcaggtgaggatattaaggaatttagtgaagataatggttttagtttatttgatgctactcttcagaagcgtgtgacttccgatgagaggagcaatttccaggaagcatgtaataatattttagattcctatgagatgtttaatttgcagtcaaaagctgtgaaaagaaaaactactgcagaaaacgtaaacacacagagttctagggattcagaagctaccagaaaaaatacaaatgatgcatttttgtacatttatgaatcaggtggtccaggccatagcaaaatgacagagccatctttacaaaacaaagacagctcttgctcagaatcaaagatgttagaacaagagacaattgtagcatcagaagctggagaaaatgagaaacataaaaaatctttcctggaacatagctctttagaaaatccgtgtggaaccagtttagaaatgtttttaagcccttttcagacaccatgtcactttgaggagagtgggcaggatctagaaatatggaaagaaagtactactgttaatggcatggctgccaacatcttgaaaaataatagaattcagaatcaaccaaagagatttaaagatgctactgaagtgggatgccagcctctgccttttgcaacaacattatggggagtacatagtgctcagacagagaaagagaaaaaaaaagaatctagcaattgtggaagaagaaatgtttttagttatgggcgagttaaattatgttccactggctttataactcatgtagtacaaaatgaaaaaactaaatcaactgaaacagaacattcatttaaaaattatgttagacctggtcccacacgtgcccaagaaacatttggaaatagaacacgtcattcagttgaaactccagacatcaaagatttagccagcactttaagtaaagaatctggtcaattgcccaacaaaaaaaattgcagaacgaatataagttatgggctagagaatgaacctacagcaacttatacaatgttttctgcttttcaggaaggtagcaaaaaatcacaaacagattgcatattatctgatacatccccctctttcccctggtatagacacgtttccaatgatagtaggaaaacagataaattaattggtttctccaaaccaatcgtccgtaagaagctaagcttgagttcacagctaggatctttagagaagtttaagaggcaatatgggaaggttgaaaatcctctggatacagaagtagaggaaagtaatggagtcactaccaatctcagtcttcaagttgaacctgacattctgctgaaggacaagaaccgcttagagaactctgatgtttgtaaaatcactactatggagcatagtgattcagatagtagttgtcaaccagcaagccacatccttaactcagagaagtttccattctccaaggatgaagattgtttagaacaacagatgcctagtttgagagaaagtcctatgaccctgaaggagttatctctctttaatagaaaacctttggaccttgagaagtcatctgaatcactagcctctaaattatccagactgaagggttccgaaagagaaactcaaacaatggggatgatgagtcgttttaatgaacttccaaattcagattccagtaggaaagacagcaagttgtgcagtgtgttaacacaagatttttgtatgttatttaacaacaagcatgaaaaaacagagaatggtgtcatcccaacatcagattctgccacacaggataattcctttaataaaaatagtaaaacacattctaacagcaatacaacagagaactgtgtgatatcagaaactcctttggtattgccctataataattctaaagttaccggtaaagattcagatgttcttatcagagcctcagaacaacagataggaagtcttgactctcccagtggaatgttaatgaatccggtagaagatgccacaggtgaccaaaatggaatttgttttcagagtgaggaatctaaagcaagagcttgttctgaaactgaagagtcaaacacgtgttgttcagattggcagcggcatttcgatgtagccctgggaagaatggtttatgtcaacaaaatgactggactcagcacattcattgccccaactgaggacattcaggctgcttgtactaaagacctgacaactgtggctgtggatgttgtacttgagaatgggtctcagtacaggtgtcaaccttttagaagcgaccttgttcttcctttccttccgagagctcgagcagagaggactgtgatgagacaggataacagagatactgtggatgatactgttagtagcgaatcgcttcagtctttgttctcagaatgggacaatccagtatttgcccgttatccagaggttgctgttgatgtaagcagtggccaggctgagagcttagcagttaaaattcacaacatcttgtatccctatcgtttcaccaaaggaatgattcattcaatgcaggttctccagcaagtagataacaagtttattgcctgtttgatgagcactaagactgaagagaatggcgaggcaggtgggaacctgctcgtgctggtggatcagcacgctgcccatgagcgtatacgtctggagcagcttatcattgattcctacgagaagcaacaggcacaaggctctggtcggaaaaaattactgtcttctactctaattcctccgctagagataacagtgacagaggaacaaaggagactcttatggtgttaccacaaaaatctggaagatctgggccttgaatttgtatttccagacactagtgattctctggtccttgtgggaaaagtaccactatgttttgtggaaagagaagccaatgaacttcggagaggaagatctactgtgaccaagagtattgtggaggaatttatccgagaacaactggagctactccagaccaccggaggcatccaagggacattgccactgactgtccagaaggtgttggcatcccaagcctgccatggggccattaagtttaatgatggcctgagcttacaggaaagttgccgccttattgaagctctgtcctcatgccagctgccattccagtgtgctcacgggagaccttctatgctgccgttagctgacatagaccacttggaacaggaaaaacagattaaacccaacctcactaaacttcgcaaaatggcccaggcctggcgtctctttggaaaagcagagtgtgatacaaggcagagcctgcagcaatccatgcctccctgtgagccaccatgagaacagaatcactggtctaaaaggaacaaagggatgttcactgtatgcctctgagcagagagcagcagcagcaggtaccagcacggccctgactgaatcagcccagtgtccctgagcagcttagacagcagggctctctgtatcagtctttcttgagcagatgattcccctagttgagtagccagatgaaattcaagcctaaagacaattcattcatttgcatccatgggcacagaaggttgctatatagtatctaccttttgctacttatttaatgataaaatttaatgacagtttgattggttgcttggtttgttatttgaagggtgtgatttttgtttttgtacagttttttttcaagcttcacatttgcgtgtatctaattcagctgatgctcaagtccaaggggtagtctgccttcccaggctgcccccagggtttctgcactggtcccctcttttcccttcagtcttcttcacttccctatgctgctgcttcatgtgctacatctcagacttaaagagtttctctactacagtgaaaacattctctagggtctttcatcaggcctttagttattttagggataaaaactattgataaaaaggacaaggatagaacagagaaaatttaaagtcctgttccgggttttttgttatgttttctttaaaaactcagagactgatgttcaatatcccaaaccagtaaaatggtgaaaatactatgagcttgttttttaaaatatgattttttttggtactttataaagtatctctttatgtgaaagcaattgtcatatcaaaacacagcatacatacgttcaacctaaccaaatatctttacactttttctttcaggagacaagggttctttgggtccctttcaaacggtatcttggtgttattacattatgcctatctattgcccttataatatcacttgggaccaggactgatcgttctgcaaatgcttgttatgccattctcaatctatttttcccgcaccttttcacatgatttgtggttaataggactcaacagactaaaattgcatagtagaaaaaaaatgcaaaaagccagctggtaatgtttattgcaactggggtgctatacaattagtaagatgatgcaatgagaatttctacttttgtatttcctgaccagcctgctcaaagtggcttttatatcaattgaatgattttcctcattttttaatacaggaaaccaattcgtgctcatggaagaaaagttcctttgccagcagccttgaagtgaatcttacaggagcaatgaaagtattgcattcattagcgtctgccccagagaaggttcagagaaaaccttcacttgttttcaaggggatccttgtagatttacgtaattggaatcctgaagaacaggccctactgtctaaaaaatggcttttattcttctaaatacatataaacggatgttttatagatgggaagacatgaccttagaaaggagagagttttcagaggatttgccaggctgtcaggggctctgcctccaggcccagtgtggcagtgtggcctcagggcctccgcctccctgcttgagggctgcatggaggccaactgtcctgggagttgtaaaaatcttttaaggccagaccaatttgagggattttaaaaagtgtctcagtgcctcttatgatttcagaaggttttgctatatgtaatcccaactactgttttcttgagagtagcagaggattagaaaaagtcctccataaattatgtaaccggccttcctgactagcctgactcaagcaatgtaagagataattattctgttttcataatttataagtgtgggggcatgcctcagcataaaaacaacctattagggaaaaatatctaatagattacctttatcgcctgttagggttttatgttgtttttaactcagatgccataagaacaaagatacatgtaatttataatagtaatcattaatacctatattgtgctttaaggtttacaaaataatttttctcatactttatcttagtttagtttcttgacagtccatgaggtaaggtggtagctttatcaccattttacaaagtgggaaacgaaggttcctcttaggaacctagttgtcacctttgtataataaaacttcgaagctcggagctgttaactggtttgctgaaggcttagctgtaagagccagaattcagacccaggtctgagtgacttcaaactgcacagtccttcccattattacccatatgctatcccttatatttttaatttattaggaattcattcatttataaacttggtgattcacctttattagattctggtcgctgaaggctttagtaacttcagagtaaaacttgagagatgagatgtaaaatgcagccattcttgagagttcctttttctgtaacattcatcaacacttcattgagaagtgaaggttcctatggctgtctctaccttcaagaggcttagctttagtcactgagaaagacaaggaaactaatgatagaatatagtagcttcttctggcgttaggtatcacagagtcacagctagttacagctagccctttattattgaaagaagaggagctagcagtcccactatcagaattaagactagagatggtaataggagctagtatcagaaaagcttaaggcaaagcataaagtgtaggctagaatgaagctggagaatggggagggggcttgggtaacatccagaacctggctggggacctggaactacatgagatgtaagaatggagaggttctagcagtcagaggtcaggtacaaatgaacagctgggatctgcgcatggcagacagtgaaaaaacccaggcaagcaaaatggtcagagcagaaaggggcccaaggccacgttcttgagatgtggagggggctgaggaagccacgccaagtaaggacagatgcagctcagcagttcctagcgagccctgacaagccagctcagctgaagcttcgggtgggagccagtcatggcacagtggagtgaaggaagagcagtttcaggcacccaaaacctgacccccacgacctgttttccacctgaagagccacccattccatccaaacccttggcaaaagtctgctaacagagagaaccggccagtatgctggccagtcgcgatcatgcctgtctttaccctctaagctgaagctgctcatcaacggtgagatggcaaaaaggtgggtccagaagaggggaaaagaagggagtctgtgaaaacaaaatgctgaagaatctgcatcaaataaacccttccttccttcctttttccttcaaaaaaaaaaaaaaa

SEQ ID NO: 41 - DNA, 830 bp, Homo sapiens
agtcggcgccaaaatcaaacgcgtcctggcctgtcccgcccctctccccaagcgcgggcccggccagcggaagcccctgcgcccgcgccatgtcaaagaaaaaaggactgagtgcagaagaaaagagaactcgcatgatggaaatattttctgaaacaaaagatgtatttcaattaaaagacttggagaagattgctcccaaagagaaaggcattactgctatgtcagtaaaagaagtccttcaaagcttagttgatgatggtatggttgactgtgagaggatcggaacttctaattattattgggcttttccaagtaaagctcttcatgcaaggaaacataagttggaggttctggaatctcagttgtctgagggaagtcaaaagcatgcaagcctacagaaaagcattgagaaagctaaaattggccgatgtgaaacggccaagcaaataaagtagccaaagaagctgctaacagatggactgataacatattcgcaataaaatcttgggccaaaagaaaatttgggtttgaagaaaataaaattgatagaacttttggaattccagaagactttgactacatagactaaaatattccatggtggtgaaggatgtacaagcttgtgaatatgtaaattttaaactattatctaactaagtgtactgaattgtcgtttgcctgtaactgtgtttatcattttattaatgttaaataaagtgtaaaatgcagatgttcttcaccccttttggtagaacaaaagcaggatgataaccatatccccccagtgctcatcaaagtaggacaataaaaatccatccatctcagtc

SEQ ID NO: 42 - DNA, 1779 bp, Homo sapiens
cggcgtgccctggggcggcgcgggcgcaggggcgcgtgcgcggcgggctgtcgttggctggagcagcggctgcgcgggtcgcggtgctgtgaggtctgcgggcgctggcaaatccggcccaggatgtagagctggcagtgcctgacggcgcgtctgacgcggagttgggtggggtagagagtagggggcggtagtcgggggtggtgggagaaggaggaggcggcgaatcacttataaatggcgccgaagcaggacccgaagcctaaattccaggaggttgggatgaatgggttccggagagcagagtactcaaatacgtggacaccaatttgcagaaacagcgagaacttcaaaaagccaatcaggagcagtatgcagaggggaagatgagaggggctgccccaggaaagaagacatctggtctgcaacagaaaaatgttgaagtgaaaacgaaaaagaacaaacagaaaacacctggaaatggagatggtggcagtaccagtgagacccctcagcctcctcggaagaaaagggcccgggtagatcctactgttgaaaatgaggaaacattcatgaacagagttgaagttaaagtaaagattcctgaagagctaaaaccgtggcttgttgatgactgggacttaattaccaggcaaaaacagctcttttatcttcctgccaagaagaatgtggattccattcttgaggattatgcaaattacaagaaatctcgtggaaacacagataataaggagtatgcggttaatgaagttgtggcagggataaaagaatacttcaacgtaatgttgggtacccagctactctataaatttgagagaccacagtatgctgaaattcttgcagatcatcccgatgcacccatgtcccaggtgtatggagcgccacatctcctgagattatttgtacgaattggagcaatgttggcttatacacctctggatgagaagagccttgctttattactcaattatcttcacgatttcctaaagtacctggcaaagaattctgcaactttgttcagtgccagcgattatgaagtggctcctcctgagtaccatcggaaagctgtgtgagaggcactctcactcacttatgtttggatctccgtaaacacatttttgttcttagtctatctcttgtacaaacgatgtgctttgaagatgttagtgtataacaattgatgtttgttttctgtttgattttaaacagagaaaaaataaaagggggtaatagctccttttttcttctttctttttttttttcatttcaaaattgctgccagtgttttcaatgatggacaacagagggatatgctgtagagtgttttattgcctagttgacaaagctgcttttgaatgctggtggttctattcctttgacactacgcacttttataatacatgttaatgctatatgacaaaatgctctgattcctagtgccaaaggttcaattcagtgtatataactgaacacactcatccatttgtgcttttgtttttttttatggtgcttaaagtaaagagcccatcctttgcaagtcatccatgttgttacttaggcattttatcttggctcaaattgttgaagaatggtggcttgtttcatggtttttgtatttgtgtctaatgcacgttttaacatgatagacgcaatgcattgtgtagctagttttctggaaaagtcaatcttttaggaattgtttttcagatcttcaataaattttttctttaaatttcaaagaacaaaaaaaaaaaaaaa

SEQ ID NO: 43 - DNA, 5164 bp, Homo sapiens
acgttatccatgaagtgtcgcgagagaaacggacgccgttctctcccgcggaattcaggtttacggccctgcgggttctcagaggcaagttcagaccgtgttgttttcttttcacggatcctgccctttcttcccgaaaagaagacagccttgggtcgcgattgtggggcttcgaagagtccagcagtgggaatttctagaatttggaatcgagtgcattttctgacatttgagtacagtacccaggggttcttggagaagaacctggtcccagaggagcttgactgaccataaaaatgagtactgcagatgcacttgatgatgaaaacacatttaaaatattagttgcaacagatattcatcttggatttatggagaaagatgcagtcagaggaaatgatacgtttgtaacactcgatgaaattttaagacttgcccaggaaaatgaagtggattttattttgttaggtggtgatctttttcatgaaaataagccctcaaggaaaacattacatacctgcctcgagttattaagaaaatattgtatgggtgatcggcctgtccagtttgaaattctcagtgatcagtcagtcaactttggttttagtaagtttccatgggtgaactatcaagatggcaacctcaacatttcaattccagtgtttagtattcatggcaatcatgacgatcccacaggggcagatgcactttgtgccttggacattttaagttgtgctggatttgtaaatcactttggacgttcaatgtctgtggagaagatagacattagtccggttttgcttcaaaaaggaagcacaaagattgcgctatatggtttaggatccattccagatgaaaggctctatcgaatgtttgtcaataaaaaagtaacaatgttgagaccaaaggaagatgagaactcttggtttaacttatttgtgattcatcagaacaggagtaaacatggaagtactaacttcattccagaacaatttttggatgacttcattgatcttgttatctggggccatgaacatgagtgtaaaatagctccaaccaaaaatgaacaacagctgttttatatctcacaacctggaagctcagtggttacttctctttccccaggagaagctgtaaagaaacatgttggtttgctgcgtattaaagggaggaagatgaatatgcataaaattcctcttcacacagtgcggcagtttttcatggaggatattgttctagctaatcatccagacatttttaacccagataatcctaaagtaacccaagccatacaaagcttctgtttggagaagattgaagaaatgcttgaaaatgctgaacgggaacgtctgggtaattctcaccagccagagaagcctcttgtacgactgcgagtggactatagtggaggttttgaacctttcagtgttcttcgctttagccagaaatttgtggatcgggtagctaatccaaaagacattatccattttttcaggcatagagaacaaaaggaaaaaacaggagaagagatcaactttgggaaacttatcacaaagccttcagaaggaacaactttaagggtagaagatcttgtaaaacagtactttcaaaccgcagagaagaatgtgcagctctcactgctaacagaaagagggatgggtgaagcagtacaagaatttgtggacaaggaggagaaagatgccattgaggaattagtgaaataccagttggaaaaaacacagcgatttcttaaagaacgtcatattgatgccctcgaagacaaaatcgatgaggaggtacgtcgtttcagagaaaccagacaaaaaaatactaatgaagaagatgatgaagtccgtgaggctatgaccagggccagagcactcagatctcagtcagaggagtctgcttctgcctttagtgctgatgaccttatgagtatagatttagcagaacagatggctaatgactctgatgatagcatctcagcagcaaccaacaaaggaagaggccgaggaagaggtcgaagaggtggaagagggcagaattcagcatcgagaggagggtctcaaagaggaagagcctttaaatctacaagacagcagccttcccgaaatgtcactactaagaattattcagaggtgattgaggtagatgaatcagatgtggaagaagacatttttcctaccacttcaaagacagatcaaaggtggtccagcacatcatccagcaaaatcatgtcccagagtcaagtatcgaaaggggttgattttgaatcaagtgaggatgatgatgatgatccttttatgaacactagttctttaagaagaaatagaagataatatatttaatggcactgagaaacatgcaagatacaggaaaaatgaaaatgttacaagctaagagtttacagtttaagattttaagtattgtttcctgagcataactccataagtaagaaatttctagttcacagacatacaatagcattgattcaccttgtttttttaacctggttgttgtagtaagagctttgtttcaatatcactcttgagtaaagattaaaataaagctaccattttacatttctatttcataatgaaaaactatgtcagtattttaatatggttacatttagccaaagttgagggaaagagcttataaaatttaacttcttcataattttagtaatttcctagaggttctgggttttctgaaagtaaaacaatttatgcgaacctatgtctaaattcactgtttgttactatgtatgtttttttccaatgcttcttataagactaaatgattagaagtacctaatagtttgaacagatatgtttttatttaaaagagtagaataacctttcagaattactgagttttttattccagttgtagcaaagatttcaaaagattgtgttcccattaagtggtagtaatttcctttattattctgtatccttaatggtgttctctctctctctctctctctctctctctccctctcccccccgttccccactcttcctttctcctttgctttttcttctctttcatacatatatgcgtgcctagttctaggaggaaacgggttaaaaattgttttaaactacatcttgaaaatattgaagaatttgttttaggtagagtggtcagttgaaccttacagtaaagtatagaaatatatttaatgtggaatgtcaatgccaggatttctcattaacaatattttatctcaactttggttcctgtgatacatttctgaatgggcaattccagaaatcttagtagcccatgttaagcttctattttttacttgttttcggggagaaataagaattagacatcttcagatttaagttaaataatcccattctttataatcctctgtaaaaagatccctgagattattccttcttctagttttatgcgacagctttactttaaaattcaagttatacatcttgggagtacaatggcccgacatttcttcataggtagaaacaaatacttgactcagtgatactcatgaccattagaatagtcatacctggaatgtgtcaaattataagagacagacacttggttagtggctgcctcatatagcacttttgaagaggcctaagtcaaaacttgcaatataacattctattgactttcttaaaaatattttttctgtacctaacttgagcataagggttatttgagcaagtaacattaactcagtggaaggcattgtcctgtgaaatattcttaggcagatctgcccacatctttattgaacttgaaatctaatatttctagtatttgaacaaagcagaaggttaagtcagggaagagcagtgctgtccatgatgtaatggaagctaccaggggaggcagtgtctggatgatgctgtgctacctacccctgcacaagccatgctggctcagtctgagctgtgggccacatcagctagtggctcttctcatgcatcagttaggtgggtctgggtgagagttatagtgagggaatggtcactaaagtatcctgacaagttcctaggaaaaaaggaataaagtttttttccttaaaaaaaaaaaaattgctcttggctgtgaaaagaggtactaaatgcgattcagttcaccgctaaggaaagtgatgacatagcagttacagagggtgataaatctctccagctaattcaggtcattttgtgaatactatgtatcaagccctgaaaatatggtaaataaaacgtgacagggaaacctttttttgattgaatattgttacatagttaaatgtgctatatatccttaatattttatattgatcctgcaaaatctgttggttttaggggagttttgttttttgtttctaacaattttcagacctgttggtataggaatgtagaagtctttcagatgatttgaaagcagctgcatttgctcttggaggctttgggagagcaggaatgaaaacattcagaggaagacatctgtagggaattcttctgttacttaccaaagaataagtgtctttctggtgttttatttcctatcataaaaatacaacagtgcatttacaaggttaaagattcctcgaagttctaggaaattcttgaaaatataagtggtgcttagaaaattcaagcatttaggaatgtgacctttaattcaggtatgtaaaagacttttttcccaaacttttaaaagtaggaaatacaataaatacagaaaagtcatatggttgaataaataattataaattgagcactgatggaatccctctacaggtcaagaaatagcgcagtgtcctggatgcccattatattgttttctcctttctgggtaacaagccctaacttctgtaatttaaaagctcctacttttgccacaaggtggtgcttctgccattagacgcagttaggaggatgcaactgcaaatctaaaattacgaagttagtgtagttgcaataaacttagaacatatgcattaatactaaacctatgcagtaataccataattagccttctaatcatgtaatttgctttacttaggtatttcatttggttcagcctgttatggaatttaccagcttgataaatttgcctataaagttttataaagaaaaggaatattttgttttcataaagaggaaaatccattcttagaaaaaaa

SEQ ID NO: 44 - DNA, 3293 bp, Homo sapiens
agtgcgtcggcgcgcagttctcccgcccgtttcagcggcgcagcttctgtagttgggctactggaggggtcgctcagaaacctcatacttctcgggtcagggaaggtttgggaggatgctgaggcctgagatctcatcaacctcgccttctgccccggcggtttccccgtcgtcgggagaaacccgctcacctcagggtccccgctacaatttcggactccaggagactccacagagccgcccttcggtccaggtggtctctgcatccacctgtcctggcacgtcaggagctgcgggcgaccggagcagcagcagcagcagccttccctgccccgcgccaaactcccggccagctcaaggttcatactttggaaacaaaagagcttatgcagaaaacacagttgcatcaaattttacttttggtgcaagctcatcttctgcacgagatactaattatcctcaaacacttaaaactccattgtctactggaaatcctcagagatcaggttataagagctggacaccacaagtgggatattcagcttcatcctcatctgcgatttctgcacactccccatcagttattgtagctgttgtagaagggagaggacttgccagaggtgaaataggaatggcaagtattgatttaaaaaacccccaaattatactatcccagtttgcagacaacacaacatatgcaaaggtgatcactaaacttaaaattttatcacctttggaaataataatgtcaaatactgcttgtgctgtggggaattccaccaagttgttcactctgatcacagaaaatttcaagaatgttaatttcactactatccaaaggaaatacttcaatgaaacaaaaggattagagtacattgaacagttatgcatagcagaattcagcactgtcctaatggaggttcagtccaagtattactgccttgcagctgttgcagctttgttaaaatatgttgaatttattcaaaattcagtttatgcaccaaaatcactgaagatttgtttccagggtagtgaacagacagccatgatagattcatcatcagcccaaaaccttgaattgttaattaataatcaagactataggaataatcacactctctttggtgttctaaattatactaagactcctggagggagtagacgacttcgttctaatatattagagcctctagttgatattgaaaccattaacatgagattagattgtgttcaagaactacttcaagatgaggaactattttttggacttcaatcagttatatcaagatttcttgatacagagcagcttctttctgttttagtccaaattccaaagcaagacacggtcaatgctgctgaatcaaagataacaaatttaatatacttaaaacataccttggaacttgtggatcctttaaagattgctatgaagaactgtaacacacctttattaagagcttactatggttccttggaagacaagaggtttggaatcatacttgaaaagattaaaacagtaattaatgatgatgcaagatacatgaaaggatgcctaaacatgaggactcagaagtgctatgcagtgaggtctaacataaatgaatttcttgacatagcaagaagaacatacacagagattgtagatgacatagcaggaatgatatcacaacttggagaaaaatatagtctacctttaaggacaagttttagctctgctcgaggatttttcatccagatgactacagattgtatagccctacctagtgatcaacttccttcagaatttattaagatttctaaagtgaaaaattcttacagctttacatcagcagatttaattaaaatgaatgaaagatgccaagaatctttgagagaaatctatcacatgacttatatgatagtgtgcaaactgcttagtgagatttatgaacatattcattgcttatataaactatctgacactgtgtcaatgctggatatgctactgtcatttgctcatgcctgcactctttctgactatgttcgaccagaatttactgatactttagcaatcaaacagggatggcatcctattcttgaaaaaatatctgcggaaaaacctattgccaacaatacctatgttacagaagggagtaattttttgatcataactggaccaaacatgagtggaaaatccacatatttaaaacagattgctctttgtcagattatggcccagattggatcatatgttccagcagaatattcttcctttagaattgctaaacagatttttacaagaattagtactgatgatgatatcgaaacaaattcatcaacatttatgaaagaaatgaaagagatagcatatattctacataatgctaatgacaaatcgctcatattaattgatgaacttggcagaggtactaatacggaagaaggtattggcatttgttatgctgtttgtgaatatctactgagcttaaaggcatttacactgtttgctacacatttcctggaactatgccatattgatgccctgtatcctaatgtagaaaacatgcattttgaagttcaacatgtaaagaatacctcaagaaataaagaagcaattttgtatacctacaaactttctaagggactcacagaagagaaaaattatggattaaaagctgcagaggtgtcatcacttccaccatcaattgtcttggatgccaaggaaatcacaactcaaattacgagacaaattttgcaaaaccaaaggagtacccctgagatggaaagacagagagctgtgtaccatctagccactaggcttgttcaaactgctcgaaactctcaattggatccagacagtttacgaatatatttaagtaacctcaagaagaagtacaaagaagattttcccaggactgaacaagttccagaaaagactgaagaataatcacaattctaatgtaataatatatcttaattcaaggaacctagaatttatttttctccttagagataaggaaaataacatttgccaaatttcatattttaattgaaaattacattatattaacatcacaattgtcatctatatattctatatgaaaaatatttattataacttaacaaatgagaactacttaaaggaatggtttttatgttaggagaaaatacaatacaccacttttttctcacaaaaattcacattattaagacctaagttcatttatacttacaagttatagtttaaaatattattgtaaataccctagtttaataaacacctttctttttaggtctgaaaaaaaaaaaaaaaa

SEQ ID NO: 45 - DNA, 3069 bp, Homo sapiens
cgaaggtgttccggaaggaggcgaaccctgaggcgggcccggcaagccttccctgcggccggcagagcccaacgactagtgggactccgcgggggcgggggtagctggagcctggctctggcctggcaggagccgagctcgttccggaagaagccgagcggacgggggccagcctcagcgtcccgggagtgaggcgatagctgcggcggcgacagcgcgggccgggatgaaccgcgacggctgaggcagcggaggtgccggctgcgcgggccccagtgagactccctcgaagcggcagcccaccgttcggggctttgcctcgagccgagccctgcccccgcgagcctcccggacccctttgtgcggccggaggcggcggcgggaacggccatggcggccaacatgtaccgggtgggagattacgtctattttgagaactcttccagcaatccttacctggttagacggattgaggagctcaacaagactgcaaatggaaatgtggaggcaaaggttgtctgtcttttccggcgcagggacatttctagtagcctcaacagcctggctgatagtaatgccagggagtttgaagaggaatcaaagcagccaggggtgtctgagcagcagcgccatcaactgaagcaccgggaactttttctttctcggcaatttgaatcattaccagccacccacatacgggggaaatgcagtgtgaccctcttgaatgagacagatatcttgagccagtacctggaaaaggaggactgctttttttactcactggtgtttgaccccgtgcagaagacacttctcgctgatcagggcgagattagagttggttgcaaataccaagctgagatcccagatcgcctagtagagggagaatctgataatcggaaccagcagaagatggagatgaaggtctgggacccagacaaccctctcacagaccggcagatcgaccagtttcttgtggtggcccgagctgtgggaacctttgcaagagccctagattgtagcagctccattcggcagccaagcttgcacatgagtgcagctgctgcctcccgagatatcactctgtttcacgccatggataccttgcaaaggaacggctacgacctggctaaggccatgtcgaccctggtaccccagggaggcccggtgctgtgtcgggatgagatggaggaatggtcagcctcagaggccatgctatttgaggaggccctagagaagtatgggaaggacttcaatgatattcgccaggattttctaccctggaagtcacttgccagcatagtccagttttattacatgtggaaaaccacagaccggtatattcagcagaaaaggttgaaagctgctgaagcagacagcaaactgaaacaggtctacattcccacctacactaagccaaaccctaaccagatcatttctgtgggttcaaaacctggcatgaatggggctggatttcagaagggcctgacttgtgagagttgccacaccacacagtctgctcagtggtatgcctggggcccacctaacatgcagtgccgcctctgtgcttcctgttggatctactggaagaagtatgggggactgaagaccccaactcagcttgagggggccactcggggcaccacggagccacactcaaggggtcatttatccagacctgaagctcaaagtctctctccttacacaaccagcgccaacagggccaagctactggctaagaacagacaaactttcctgcttcagaccacaaagctgacccgtcttgccagacgcatgtgcagggacctattacagccaaggagggccgcccgacggccttatgctcctatcaatgccaatgccatcaaagcagagtgctccattcgacttcctaaggccgccaagactccattgaagattcaccctctggtgcggctgcccctggcaactatcgtcaaagatctggtggcccaggcacccctgaaaccaaaaacacctcggggtaccaagacaccgatcaacagaaaccagctgtcccagaaccggggactggggggcattatggtgaaacgggcctatgagactatggcaggggcaggggttcctttctctgccaatggaaggcctctggcttcagggattcgttcaagctcacagccagcagccaagcgtcagaaactaaacccagctgatgcccccaatcctgtggtgtttgtggccacaaaggataccagggccctacggaaggctctgacccatctggaaatgcggcgagctgctcgccgacccaacttgcccctgaaggtgaagccaacgctgattgcagtgcggccccctgtccctctacctgcaccctcacatcctgccagcaccaatgagcctattgtcctggaggactgagcacctgtggggaagggaggtgggctgagaggtagagggtggatgcccagggcacccaaacctcccttccctttcgtgtcgaagggagtgaggagtgaattaaggaagagagcaagtgagtgtgtgtccctggaggggttgggcgccctctggtgttaccacctcgagacttgtctcatgcctccatgcttgccgatggaggacagactgcaggaacttggcccatgtgggaacctagcctgttttggggggtaggacccacagatgtcttggacagttttggggggagggttttttaattttttaaaaattttgcctccctttgtgaaaggggatggggaggggaagagtaaacagataacaggtggtggtacctggttgggggaggggggcgtgcactgccatgtctttttttttttttttttttttttttttcctaattgggggtttctctttctgtccggtgtccggactttcctaattggagtttgaggcccctaagctggcatcaaccccaggccacgctcgctctttccttccctcccctccccctctgccttttgtacgccagttctcagaaataaagatcttttgtccgtttttttaacctcggattctgtaattggttcttatagtaacaaataaaaagctgttttcttcagcttctcctgg

SEQ ID NO: 46 - DNA, 4069 bp, Homo sapiens
gcaggccgaatggtggatttaattggccggagtttagggcgcgcttggcccgcgtgggtcagctgatcgcgcactgagggtgcgatcccgggctccccattccttcctggggcgcctccccggcccagggccaactgggtcccggtgtcggcaggcctggggtcggcgacggctgctcttttcgttctgtcgcctgcccgatggacgagcctcccgggaagcccctcagctgtgaggagaaggaaaagttaaaggagaaattagcattcttgaaaagggaatacagcaagacactagcccgccttcagcgtgcccaaagagctgaaaagattaagcattctattaagaaaacagtagaagaacaagattgtttgtctcagcaggatctctcaccgcagctaaaacactcagaacctaaaaataaaatatgtgtttatgacaagttacacatcaaaacccatcttgatgaagaaactggagaaaagacatctatcacacttgatgttgggcctgagtcctttaaccctggagatggcccaggaggattacctatacaaagaacagatgacacccaagaacattttccccacagggtcagtgaccctagtggtgagcaaaagcagaagctgccaagcagaagaaagaagcagcagaagaggacatttatttcacaggagagagactgtgtctttggcactgattcactcagattgtctgggaaaagactaaaggaacaggaagaaatcagtagcaaaaatcctgctagatcaccagtaactgaaataagaactcaccttttaagtcttaaatctgaacttccagattctccagaaccagttacagaaattaatgaagacagtgtattaattccaccaactgcccaaccagaaaaaggtgttgatacattcctaagaagacctaatttcaccagggcgactacagttcctttacagactctatcagatagcggtagtagtcagcaccttgaacacattcctcctaaaggtagcagtgaacttactactcacgacctaaaaaacattagatttacttcacctgtaagtttggaggcacaaggcaaaaaaatgactgtctctacagataacctccttgtaaataaagctataagtaaaagtggccaactgcccacaagttctaatttagaggcaaatatttcatgttctctaaatgaactcacctacaataacttaccagcaaatgaaaaccaaaacttaaaagaacaaaatcaaacagagaaatctttaaaatctcccagtgacactcttgatggcaggaatgaaaatcttcaggaaagtgagattctaagtcaacctaagagtcttagcctggaagcaacctctcctctttctgcagaaaaacattcttgcacagtgcctgaaggccttctgtttcctgcagaatattatgttagaacaacacgaagcatgtccaattgccagaggaaagtagccgtggaggctgtcattcagagtcatttggatgtcaagaaaaaagggtttaaaaataaaaataaggatgcaagtaaaaatttaaacctttccaatgaggaaactgaccaaagtgaaattaggatgtctggcacatgcacaggacaaccaagttcaagaacctctcagaaacttctctcattaactaaagtcagctctcccgctgggcccactgaagataatgacttgtctaggaaggcagttgcccaagcacctggtagaagatacacaggaaaaagaaaatcagcctgcaccccagcatcagatcattgtgaaccacttttgccaacttctagcctgtcgattgttaacaggtccaaggaagaagtcacctcacacaaatatcagcacgaaaaattatttattcaagtgaaagggaagaaaagtcgtcatcaaaaagaggattccctttcttggagtaatagtgcttatttatccttggatgatgatgctttcacggctccatttcatagggatggaatgctgagtttaaagcaactactgtcttttctcagtatcacagactttcagttacctgatgaagactttggacctcttaagcttgaaaaagtgaagtcctgctcagaaaaaccagtggagccctttgagtcaaaaatgtttggagagagacatcttaaagagggaagctgtatttttccagaggaactgagtcctaaacgcatggatacagaaatggaggacttagaagaggaccttattgttctaccaggaaaatcacatcccaaaaggccaaactcgcaaagccagcatacaaagacgggcctttcttcatccatattactttatactcctttaaatacggttgcgcctgatgataatgacaggcctaccacagacatgtgttcacctgctttccccatcttaggtactactccagcctttggccctcaaggctcctatgaaaaagcatctacagaagttgctggacgaacttgctgcacaccccaacttgctcatttgaaagactcagtctgtcttgccagtgatactaaacaattcgacagttcaggcagcccagcaaaaccacataccaccctgcaagtgtcaggcaggcaaggacaacctacctgtgactgtgactctgtcccgccaggaacacctccacccattgagtcattcacttttaaagaaaatcagctctgtagaaacacatgccaggagctgcataaacattccgtcgaacagactgaaacagcagagcttcctgcttctgatagcataaacccaggcaacctacaattggtttcagagttaaagaatccttcaggttcctgttccgtagatgtgagtgccatgttttgggaaagagccggttgtaaagagccatgtatcataactgcttgcgaagatgtagtttctctttggaaagctctggatgcttggcagtgggaaaaactttatacctggcacttcgcagaggttccagtattacagatagttccagtgcctgatgtgtataatctcgtgtgtgtagctttgggaaatttggaaatcagagagatcagggcattgttttgttcctctgatgatgaaagtgaaaagcaagtactactgaagtctggaaatataaaagctgtgcttggcctgacaaagaggaggctagttagtagcagtgggaccctttctgatcaacaagtagaagtcatgacgtttgcagaagatggaggaggcaaagaaaaccaatttttgatgccccctgaggagactatactaacttttgctgaggtccaagggatgcaagaagctctgcttggtactactattatgaacaacattgttatttggaatttaaaaactggtcaactcctgaaaaagatgcacattgatgattcttaccaagcttcagtctgtcacaaagcctattctgaaatggggcttctctttattgtcctgagtcatccctgtgccaaagagagtgagtcgttgcgaagccctgtgtttcagctcattgtgattaaccctaagacgactctcagcgtgggtgtgatgctgtactgtcttcctccagggcaggctggcaggttcctggaaggtgacgtgaaagatcactgtgcagcagcaatcttgacttctggaacaattgccatttgggacttacttctcggtcagtgtactgccctcctcccacctgtctctgaccaacattggtcttttgtgaaatggtcgggtacagactctcatttgctggctggacaaaaagatggaaatatatttgtataccactattcataagttagggtaaagtgaaaacacaattttctggatatattgggcctcttagtattttttggagttttaaatataaaggagaatatctgaatgacacttaaaatgattgcttgtttatgtccagacagacttattttttattctaatgatggtagcaccactgatcttggatgtacatttatgtatactttgagaaaaagggttttaggttgatttttgtaatttcccacatttgtacatgtgcttttaaaggtgtacataaagcttcaaatggcaataaatatttatttttatacattcaaaaaaaaaaa

SEQ ID NO: 47 - DNA, 1355 bp, Homo sapiens
ggatggccggagctggcgccctggttctggaggtaaccggttactgagggcgagaagcgccacccggaggctctagcctgacaaatgcttgctgacctgggccagagctcttcccttacgcaagtctcagccggtcgtcgcgacgttcgcccgctcgctctgaggctcctgaagccgaaaccagctagactttcctccttcccgcctgcctgtagcggcgttgttgccactccgccaccatgttcgaggcgcgcctggtccagggctccatcctcaagaaggtgttggaggcactcaaggacctcatcaacgaggcctgctgggatattagctccagcggtgtaaacctgcagagcatggactcgtcccacgtctctttggtgcagctcaccctgcggtctgagggcttcgacacctaccgctgcgaccgcaacctggccatgggcgtgaacctcaccagtatgtccaaaatactaaaatgcgccggcaatgaagatatcattacactaagggccgaagataacgcggataccttggcgctagtatttgaagcaccaaaccaggagaaagtttcagactatgaaatgaagttgatggatttagatgttgaacaacttggaattccagaacaggagtacagctgtgtagtaaagatgccttctggtgaatttgcacgtatatgccgagatctcagccatattggagatgctgttgtaatttcctgtgcaaaagacggagtgaaattttctgcaagtggagaacttggaaatggaaacattaaattgtcacagacaagtaatgtcgataaagaggaggaagctgttaccatagagatgaatgaaccagttcaactaacttttgcactgaggtacctgaacttctttacaaaagccactccactctcttcaacggtgacactcagtatgtctgcagatgtaccccttgttgtagagtataaaattgcggatatgggacacttaaaatactacttggctcccaagatcgaggatgaagaaggatcttaggcattcttaaaattcaagaaaataaaactaagctctttgagaactgcttctaagatgccagcatatactgaagtcttttctgtcaccaaatttgtacctctaagtacatatgtagatattgttttctgtaaataacctatttttttctctattctctgcaatttgtttaaagaataaagtccaaagtcagatctggtctagttaacctagaagtatttttgtctcttagaaatacttgtgatttttataatacaaaagggtcttgactctaaatgcagttttaagaattgtttttgaatttaaataaagttacttgaatttcaaacatca

SEQ ID NO: 48 - DNA, 7498 bp, Homo sapiens
gagcagccgccgaagagcgcttggcgccattttgaagcggagaggaggaggaacggcagggctggctgcggaaggggagggggggggagaaggcgattggatgcggcggcggcggcggatcccggagagccccggagtgagcggagtagcgagtcggcaacccggaggggtagaaatatttctgtcatggctcattcaaagactaggaccaatgatggaaaaattacatatccgcctggggtcaaggaaatatcagataaaatatctaaagaggagatggtgagacgattaaagatggttgtgaaaacttttatggatatggaccaggactctgaagaagaaaaggagctttatttaaacctagctttacatcttgcttcagatttttttctcaagcatcctgataaagatgttcgcttactggtagcctgctgccttgctgatattttcaggatttatgctcctgaagctccttacacatcccctgataaactaaaggatatatttatgtttataacaagacagttgaaggggctagaggatacaaagagcccacaattcaataggtatttttatttacttgagaacattgcttgggtcaagtcatataacatatgctttgagttagaagatagcaatgaaattttcacccagctatacagaaccttattttcagttataaacaatggccacaatcagaaagtccatatgcacatggtagaccttatgagctctattatttgtgaaggtgatacagtgtctcaggagcttttggatacggttttagtaaatctggtacctgctcataagaatttaaacaagcaagcatatgatttggcaaaggctttactgaagaggacagctcaagctattgagccatatattaccaatttttttaatcaggttctgatgcttgggaaaacatctatcagcgatttgtcagagcatgtctttgacttaattttggagctctacaatattgatagtcatttgctgctctctgttttaccccagcttgaatttaaattaaagagcaatgataatgaggagcgcctacaagttgttaaactactggcaaaaatgtttggggcaaaggattcagaattggcttctcaaaacaagccactttggcagtgctacttgggcaggtttaatgatatccatgtaccaatccgcctggaatgtgtgaaatttgctagccattgtctcatgaaccatcctgatttagcaaaagacttaacagagtatcttaaagtgaggtcacatgaccctgaggaagctattagacatgatgttattgtgtcaatagttacagctgctaaaaaggatattcttctggtcaatgatcacttacttaattttgtgagagagagaacattagacaaacgatggagagtacgcaaagaagccatgatgggacttgcccaaatttataagaaatatgctttacagtcagcagctggaaaagatgctgcaaaacagatagcatggatcaaagacaaattgctacatatatattatcaaaatagtattgatgatcgactacttgttgaacggatctttgctcaatacatggttcctcacaatttagaaactacagaacggatgaaatgcttatattacttgtatgccacactggatttaaatgctgtgaaagcattgaatgaaatgtggaaatgtcaaaatctgctccgacatcaagtaaaggatttgcttgacttgattaagcaacccaaaacagatgccagtgtcaaggccatattttcaaaagtgatggttattacaagaaatttacctgatcctggtaaggctcaggatttcatgaagaaattcacacaggtgttagaagatgatgagaaaataagaaagcagttagaagtacttgttagtccaacatgctcctgcaagcaggctgaaggttgtgtgcgtgaaataactaagaagttgggcaaccccaaacagcctacaaatcctttcctggaaatgatcaagtttctcttggagaggatagcacctgtgcacatagataccgaatctatcagtgctcttattaaacaagtgaacaaatcaatagatggaacagcagatgatgaagatgagggtgttccaactgatcaagccatcagagcaggtcttgaactgcttaaggtactctcatttacacatcccatctcatttcattctgctgaaacatttgaatcattactggcttgtctgaaaatggatgatgaaaaagtagcagaagctgcactacaaattttcaaaaacacaggaagcaaaattgaagaggattttccacacatcagatcagccttgcttcctgttttacatcacaaatctaaaaaaggacccccccgtcaagccaaatatgccattcattgtatccatgcgatattttctagtaaagagacccagtttgcacagatatttgagcctctgcataagagcctagatccaagcaacctggaacatctcataacaccattggttactattggtcatattgctctccttgcacctgatcaatttgctgctcctttgaaatctttggtagctactttcattgtgaaagatcttctcatgaatgatcggcttccagggaaaaagacaactaaactttgggttccagatgaagaagtatctcctgagacaatggtcaaaattcaggctattaaaatgatggttcgatggctacttggaatgaaaaataatcacagtaaatcaggaacttctaccttaagattgctaacaacaatattgcatagtgatggagacttgacagaacaggggaaaattagtaaaccagatatgtcacgtctgagacttgctgctgggagtgctattgtgaagctggcacaagaaccctgttaccatgaaatcatcacattagaacaatatcagctatgtgcattagctatcaacgatgaatgctatcaagtaagacaagtgtttgcccagaaacttcacaaaggcctttcccgtttacggcttccacttgagtatatggcaatctgtgccctttgtgcaaaagatcctgtaaaggagagaagagctcatgctaggcaatgtttggtgaaaaatataaatgtaaggcgggagtatctgaagcagcatgcagctgttagtgaaaaattattgtctcttctaccagagtatgttgttccatatacaattcaccttttggcacatgacccagattatgtcaaagtacaggatattgaacaacttaaagatgttaaagaatgtctttggtttgttctggaaatattaatggctaaaaatgaaaataacagtcacgcttttatcagaaagatggtagaaaatattaaacaaacaaaagatgcccaaggaccagatgatgcaaaaatgaatgaaaaactgtacactgtgtgtgatgttgccatgaatatcatcatgtcaaagagtactacatacagtttggaatctcctaaagacccggtactaccagctcgtttcttcactcaacctgacaagaatttcagtaacaccaaaaattatctgcctcctgaaatgaaatcatttttcactcctggaaaacctaaaacaaccaatgttctaggagctgttaacaagccactttcatcagcaggcaagcaatctcagaccaaatcatcacgaatggaaactgtaagcaatgcaagcagcagctcaaatccaagctctcctggaagaataaaggggaggcttgatagttctgaaatggatcacagtgaaaatgaagattacacaatgtcttcacctttgccggggaaaaaaagtgacaagagagacgactctgatcttgtaaggtctgaattggagaagcctagaggcaggaaaaaaacgcccgtcacagaacaggaggagaaattaggtatggatgacttgactaagttggtacaggaacagaaacctaaaggcagtcagcgaagtcggaaaagaggccatacggcttcagaatctgatgaacagcagtggcctgaggaaaagaggctcaaagaagatatattagaaaatgaagatgaacagaatagtccgccaaaaaagggtaaaagaggccgaccaccaaaacctcttggtggaggtacaccaaaagaagagccaacaatgaaaacttctaaaaaaggaagcaaaaaaaaatctggacctccagcaccagaggaggaggaagaagaagaaagacaaagtggaaatacggaacagaagtccaaaagcaaacagcaccgagtgtcaaggagagcacagcagagagcagaatctcctgaatctagtgcaattgaatccacacagtccacaccacagaaaggacgaggaagaccatcaaaaacgccatcaccatcacaaccaaaaaaaaatgtccgtgtaggacgctccaaacaagcagctactaaggaaaatgattcaagtgaagaagtagatgtgtttcagggtagctctcctgtcgatgatattccacaggaagaaacagaggaggaggaagtttctacagtaaatgtacggcggcgaagtgctaaaagggaacggcgatgaacaaatgtaattaataactttctctgtgaaagctttggaaaaatctttttttttttttttggtcaagcttgaggctgaataaagcctttgatgcacaaaatgggactgctgaagagtggacagttggaccttactttggtgaccccatacatttgtggtcacatgctttagccatacacatggtaacattgactatggagtcttgtgaaagtgtaatgtgcgatggctatgtagacataaagaagaaacttgtaaatatcttttttcttttttttaatgtttctgatttctgaagtgcttgtatagcttttatctgcggctttaaactgacagtacccgactgtttattggatctattgatttgaaaagaatttgttaggatagatcttaagcagtaatctgtcagtgtttgtatttgtattctctgcaattttactgtgaaaaaaaatttgttttcaacaattggtgtcattttcttgatgtcactatttgttggagagttaaatggtctcttccctttgtgtatcttacctagtgtttactcctgggcacccttaatcttcagaggtgctaaattgtctgccattacaccagaaggatgcctctgataggaggacaaccatgcaaattgtgaaatagtcctgaagttcttggattactttacacctcagtattgatttgtcccagaattttctggcctttcatggcaatgaaaattttaagaagaaagatttaaagtattttaattttaaagagtgtgttataaaataatgtactgaattctttatcccattttatcatcctttcagtttttattaatctactgtatcaataaaattctgtaatttgaatgagtttttaatagtctagaatgttattgtgtatagatatttcctcttgaacgttatgttcagaaaatgcaaattacactataatataaaacctgatatatacacattagaaatattccagttctccgtaacagtgtaaagttaatcagaaagaaaaaattttattgatgcagtgtgtctttataaagctgttcttgaaagccaagtgttttgtattttatagtgagttgcatgtttttgaaaaaaagtgctgaaaatgggatgtgctgttttctgtaaattcatatttagccatagtatatgatagattgccccataacatagtttttcatcaagagtttattattgtactttattttggagccaaaaaattgattctggggggtgggggcagcgtagaagtggtatatccaagtatatcagctactgtagttgtcacagtcttgtgaactttgaatgaaattccactttgtccagattgggagaagtggaaatttatttggatttagagcaggtctttttttttcttcattgtaatctgcaaaatgtagaaataaattacttaaggcagtatcctttatacagttgtataaactgtattttgaaccaaaacatataggttactacttaatgcttacctaatttcattttagtattttaggtgctgttatgttttttcatggttaacaccagaggggaaaaaatcatattctaacttattaaatttatcacattgaatagtggaacattttcatatgatacaccattatgtttaagatatatttccaagattggttataatagatggggcatataataaagaagctactattttggaaaatgacattttactatttgccaatgtatattgcaattgatgtgattatttttcttttaaagatttgtttgtgtttatgaaacagccatttattttttaaaaagtgttttgaattgtgtcttaatctctccatattcaactattcttcatttacaacaatagtgacaccagtaattatgagaggctgtcatatatcaaagcagctcaggtgggatcaacatacattggttttgaaatgtttccttagctcggttctcccaaacacataatttctgtttcagcagtacaaaggcatgttttaaaatctataacataaagaataaggaatagctttgtatttttgtcattgattaaattgcaccagaaatgtttatggaaatattaagaacattttataaaacatacgaaaaagtgattgtgaaggatttttatttgcatgattatagttaagcaaatttcatttcacatttttgtaatgctgtacagcagttcacaaaaaaatgttcattgtagattttgttatgttcaatgccaatgagtctgtaattttacgacctgtctgttctttttttgggtggattacgatgtaaatttttcttttctttctttctttttttttttttttgtgtagaaaaataggtgcaataatgatcaaagttttgatgtcttgagtctccatcttaggggattatcttacgtttaagcttaacatttcatgtagtaagatttggagagccacatactttacagtaaaattaagtgtgtataaaacattaattgctaacaattgttagcaaactatttcagtgataatgttcattttgaaaatatgtactgtataacattaagaaaatatttaactccctgtaacaagttccattatgaaaatcttattcctcagtgaggttatcttgctgcactctgtagcaaatttgtttaatctacattataataaaatttcttgctgcagtgcaacaggaggctttttcagtgatcttcactgtatatgtaaattacaaatgtggctgtaaaacttattccaggtattaaaggttaaattgctttctatatcttcttataacttgtaagtctgatttttaagatttccttttgtccacttgtaagaatgtcaggaatttaagaatttgtttaaattaggcatatctctgccatcacatagtattatgtcaccataatgaacaattgctatttaaatagataaccaattttcagacacatttttggatttctgtgaagttgaataaacataaaagctaat

SEQ ID NO: 49 - DNA, 2204 bp, Homo sapiens
gagcggtgcggaggctctgctcggatcgaggtctgcagcgcagcttcgggagcatgagtgctgcagtgactgcagggaagctggcacgggcaccggccgaccctgggaaagccggggtccccggagttgcagctcccggagctccggcggcggctccaccggcgaaagagatcccggaggtcctagtggacccacgcagccggcggcgctatgtgcggggccgctttttgggcaagggcggctttgccaagtgcttcgagatctcggacgcggacaccaaggaggtgttcgcgggcaagattgtgcctaagtctctgctgctcaagccgcaccagagggagaagatgtccatggaaatatccattcaccgcagcctcgcccaccagcacgtcgtaggattccacggctttttcgaggacaacgacttcgtgttcgtggtgttggagctctgccgccggaggtctctcctggagctgcacaagaggaggaaagccctgactgagcctgaggcccgatactacctacggcaaattgtgcttggctgccagtacctgcaccgaaaccgagttattcatcgagacctcaagctgggcaaccttttcctgaatgaagatctggaggtgaaaataggggattttggactggcaaccaaagtcgaatatgacggggagaggaagaagaccctgtgtgggactcctaattacatagctcccgaggtgctgagcaagaaagggcacagtttcgaggtggatgtgtggtccattgggtgtatcatgtataccttgttagtgggcaaaccaccttttgagacttcttgcctaaaagagacctacctccggatcaagaagaatgaatacagtattcccaagcacatcaaccccgtggccgcctccctcatccagaagatgcttcagacagatcccactgcccgcccaaccattaacgagctgcttaatgacgagttctttacttctggctatatccctgcccgtctccccatcacctgcctgaccattccaccaaggttttcgattgctcccagcagcctggaccccagcaaccggaagcccctcacagtcctcaataaaggcttggagaaccccctgcctgagcgtccccgggaaaaagaagaaccagtggttcgagagacaggtgaggtggtcgactgccacctcagtgacatgctgcagcagctgcacagtgtcaatgcctccaagccctcggagcgtgggctggtcaggcaagaggaggctgaggatcctgcctgcatccccatcttctgggtcagcaagtgggtggactattcggacaagtacggccttgggtatcagctctgtgataacagcgtgggggtgctcttcaatgactcaacacgcctcatcctctacaatgatggtgacagcctgcagtacatagagcgtgacggcactgagtcctacctcaccgtgagttcccatcccaactccttgatgaagaagatcaccctccttaaatatttccgcaattacatgagcgagcacttgctgaaggcaggtgccaacatcacgccgcgcgaaggtgatgagctcgcccggctgccctacctacggacctggttccgcacccgcagcgccatcatcctgcacctcagcaacggcagcgtgcagatcaacttcttccaggatcacaccaagctcatcttgtgcccactgatggcagccgtgacctacatcgacgagaagcgggacttccgcacataccgcctgagtctcctggaggagtacggctgctgcaaggagctggccagccggctccgctacgcccgcactatggtggacaagctgctgagctcacgctcggccagcaaccgtctcaaggcctcctaatagctgccctcccctccggactggtgccctcctcactcccacctgcatctggggcccatactggttggctcccgcggtgccatgtctgcagtgtgccccccagccccggtggctgggcagagctgcatcatccttgcaggtgggggttgctgtgtaagttatttttgtacatgttcgggtgtgggttctacagccttgtccccctccccctcaaccccaccatatgaattgtacagaatatttctattgaattcggaactgtcctttccttggctttatgcacattaaacagatgtgaatattcaaaaaaaaaaaaaaaaaaaaaaaaaaaaaaaaaaa

SEQ ID NO: 50 - DNA, 3538 bp, Homo sapiens
ggcaagacaacgaggatttgcgtagggggcgagcctctgaggccacttggctcttacggccacgcagggcgccgcagatgcagccggagcccgcttttccctctcaggacgacccctaggccgccagcagttccctaccgacgaaggcgactgtacagcgtccaccgcgttcgtgcccacttacccgccgccccactccgggccgccggctcgcagcaggaccagcccggctgctacggccgcggatacacgccctcaggcccggcgctgcgcagcttgcggaagctttcccggacagactcgctgccagcggattggctgcgagcagcgccaatctcacgttgcccccgggcgaggcgggactcagtgccgcgctctctgcacccgctctgccgcgcgcgtgcgtgctgggtgcgggtgcgggtgcggggttgggcctgcgcatcgggtgagacgctggctgcttgcggctagtggatggtaattgcctgcctcgcgctagcaggaagctgctctgttaaaagcgaaaatgaaacaattgcctgcggcaacagttcgactcctttcaagttctcagatcatcacttcggtggtcagtgttgtaaaagagcttattgaaaactccttggatgctggtgccacaagcgtagatgttaaactggagaactatggatttgataaaattgaggtgcgagataacggggagggtatcaaggctgttgatgcacctgtaatggcaatgaagtactacacctcaaaaataaatagtcatgaagatcttgaaaatttgacaacttacggttttcgtggagaagccttggggtcaatttgttgtatagctgaggttttaattacaacaagaacggctgctgataattttagcacccagtatgttttagatggcagtggccacatactttctcagaaaccttcacatcttggtcaaggtacaactgtaactgctttaagattatttaagaatctacctgtaagaaagcagttttactcaactgcaaaaaaatgtaaagatgaaataaaaaagatccaagatctcctcatgagctttggtatccttaaacctgacttaaggattgtctttgtacataacaaggcagttatttggcagaaaagcagagtatcagatcacaagatggctctcatgtcagttctggggactgctgttatgaacaatatggaatcctttcagtaccactctgaagaatctcagatttatctcagtggatttcttccaaagtgtgatgcagaccactctttcactagtctttcaacaccagaaagaagtttcatcttcataaacagtcgaccagtacatcaaaaagatatcttaaagttaatccgacatcattacaatctgaaatgcctaaaggaatctactcgtttgtatcctgttttctttctgaaaatcgatgttcctacagctgatgttgatgtaaatttaacaccagataaaagccaagtattattacaaaataaggaatctgttttaattgctcttgaaaatctgatgacgacttgttatggaccattacctagtacaaattcttatgaaaataataaaacagatgtttccgcagctgacatcgttcttagtaaaacagcagaaacagatgtgctttttaataaagtggaatcatctggaaagaattattcaaatgttgatacttcagtcattccattccaaaatgatatgcataatgatgaatctggaaaaaacactgatgattgtttaaatcaccagataagtattggtgactttggttatggtcattgtagtagtgaaatttctaacattgataaaaacactaagaatgcatttcaggacatttcaatgagtaatgtatcatgggagaactctcagacggaatatagtaaaacttgttttataagttccgttaagcacacccagtcagaaaatggcaataaagaccatatagatgagagtggggaaaatgaggaagaagcaggtcttgaaaactcttcggaaatttctgcagatgagtggagcaggggaaatatacttaaaaattcagtgggagagaatattgaacctgtgaaaattttagtgcctgaaaaaagtttaccatgtaaagtaagtaataataattatccaatccctgaacaaatgaatcttaatgaagattcatgtaacaaaaaatcaaatgtaatagataataaatctggaaaagttacagcttatgatttacttagcaatcgagtaatcaagaaacccatgtcagcaagtgctctttttgttcaagatcatcgtcctcagtttctcatagaaaatcctaagactagtttagaggatgcaacactacaaattgaagaactgtggaagacattgagtgaagaggaaaaactgaaatatgaagagaaggctactaaagacttggaacgatacaatagtcaaatgaagagagccattgaacaggagtcacaaatgtcactaaaagatggcagaaaaaagataaaacccaccagcgcatggaatttggcccagaagcacaagttaaaaacctcattatctaatcaaccaaaacttgatgaactccttcagtcccaaattgaaaaaagaaggagtcaaaatattaaaatggtacagatccccttttctatgaaaaacttaaaaataaattttaagaaacaaaacaaagttgacttagaagagaaggatgaaccttgcttgatccacaatctcaggtttcctgatgcatggctaatgacatccaaaacagaggtaatgttattaaatccatatagagtagaagaagccctgctatttaaaagacttcttgagaatcataaacttcctgcagagccactggaaaagccaattatgttaacagagagtctttttaatggatctcattatttagacgttttatataaaatgacagcagatgaccaaagatacagtggatcaacttacctgtctgatcctcgtcttacagcgaatggtttcaagataaaattgataccaggagtttcaattactgaaaattacttggaaatagaaggaatggctaattgtctcccattctatggagtagcagatttaaaagaaattcttaatgctatattaaacagaaatgcaaaggaagtttatgaatgtagacctcgcaaagtgataagttatttagagggagaagcagtgcgtctatccagacaattacccatgtacttatcaaaagaggacatccaagacattatctacagaatgaagcaccagtttggaaatgaaattaaagagtgtgttcatggtcgcccattttttcatcatttaacctatcttccagaaactacatgattaaatatgtttaagaagattagttaccattgaaattggttctgtcataaaacagcatgagtctggttttaaattatctttgtattatgtgtcacatggttattttttaaatgaggattcactgacttgtttttatattgaaaaaagttccacgtattgtagaaaacgtaaataaactaatatagactattcaaaaaaaaaaaaaaaaaa

SEQ ID NO: 51 - DNA, 2851 bp, Homo sapiens
agccaatgggagttcaggaggcggagcgcctgtgggagccctggagggaactttcccagtccccgaggcggatcgggtgttgcatccatggagcgagctgagagctcgagtacagaacctgctaaggccatcaaacctattgatcggaagtcagtccatcagatttgctctgggcaggtggtactgagtctaagcactgcggtaaaggagttagtagaaaacagtctggatgctggtgccactaatattgatctaaagcttaaggactatggagtggatcttattgaagtttcagacaatggatgtggggtagaagaagaaaacttcgaaggcttaactctgaaacatcacacatctaagattcaagagtttgccgacctaactcaggttgaaacttttggctttcggggggaagctctgagctcactttgtgcactgagcgatgtcaccatttctacctgccacgcatcggcgaaggttggaactcgactgatgtttgatcacaatgggaaaattatccagaaaaccccctacccccgccccagagggaccacagtcagcgtgcagcagttattttccacactacctgtgcgccataaggaatttcaaaggaatattaagaaggagtatgccaaaatggtccaggtcttacatgcatactgtatcatttcagcaggcatccgtgtaagttgcaccaatcagcttggacaaggaaaacgacagcctgtggtatgcacaggtggaagccccagcataaaggaaaatatcggctctgtgtttgggcagaagcagttgcaaagcctcattccttttgttcagctgccccctagtgactccgtgtgtgaagagtacggtttgagctgttccgatgctctgcataatcttttttacatctcaggtttcatttcacaatgcacgcatggagttggaaggagttcaacagacagacagtttttctttatcaaccggcggccttgtgacccagcaaaggtctgcagactcgtgaatgaggtctaccacatgtataatcgacaccagtatccatttgttgttcttaacatttctgttgattcagaatgcgttgatatcaatgttactccagataaaaggcaaattttgctacaagaggaaaagcttttgttggcagttttaaagacctctttgataggaatgtttgatagtgatgtcaacaagctaaatgtcagtcagcagccactgctggatgttgaaggtaacttaataaaaatgcatgcagcggatttggaaaagcccatggtagaaaagcaggatcaatccccttcattaaggactggagaagaaaaaaaagacgtgtccatttccagactgcgagaggccttttctcttcgtcacacaacagagaacaagcctcacagcccaaagactccagaaccaagaaggagccctctaggacagaaaaggggtatgctgtcttctagcacttcaggtgccatctctgacaaaggcgtcctgagacctcagaaagaggcagtgagttccagtcacggacccagtgaccctacggacagagcggaggtggagaaggactcggggcacggcagcacttccgtggattctgaggggttcagcatcccagacacgggcagtcactgcagcagcgagtatgcggccagctccccaggggacaggggctcgcaggaacatgtggactctcaggagaaagcgcctgaaactgacgactctttttcagatgtggactgccattcaaaccaggaagataccggatgtaaatttcgagttttgcctcagccaactaatctcgcaaccccaaacacaaagcgttttaaaaaagaagaaattctttccagttctgacatttgtcaaaagttagtaaatactcaggacatgtcagcctctcaggttgatgtagctgtgaaaattaataagaaagttgtgcccctggacttttctatgagttctttagctaaacgaataaagcagttacatcatgaagcacagcaaagtgaaggggaacagaattacaggaagtttagggcaaagatttgtcctggagaaaatcaagcagccgaagatgaactaagaaaagagataagtaaaacgatgtttgcagaaatggaaatcattggtcagtttaacctgggatttataataaccaaactgaatgaggatatcttcatagtggaccagcatgccacggacgagaagtataacttcgagatgctgcagcagcacaccgtgctccaggggcagaggctcatagcacctcagactctcaacttaactgctgttaatgaagctgttctgatagaaaatctggaaatatttagaaagaatggctttgattttgttatcgatgaaaatgctccagtcactgaaagggctaaactgatttccttgccaactagtaaaaactggaccttcggaccccaggacgtcgatgaactgatcttcatgctgagcgacagccctggggtcatgtgccggccttcccgagtcaagcagatgtttgcctccagagcctgccggaagtcggtgatgattgggactgctcttaacacaagcgagatgaagaaactgatcacccacatgggggagatggaccacccctggaactgtccccatggaaggccaaccatgagacacatcgccaacctgggtgtcatttctcagaactgaccgtagtcactgtatggaataattggttttatcgcagatttttatgttttgaaagacagagtcttcactaaccttttttgttttaaaatgaacctgctacttaaaaaaaatacacatcacacccatttaaaagtgatcttgagaaccttttcaaaccagaaaaaaaaaaaaaaaa

SEQ ID NO: 52 - DNA, 1452 bp, Homo sapiens
ggctttctgagttgggtggcgggaaaggcgatgagtaaaggccgggcagaagctgcggcgggaggtaacggcgccgtgggcgcggggaagacccgggagggcagtgggtgaggaggtcggttgagtggccccctcccctgcctttctctccgtagccgccgggatcctcctgaggtacctgcaggagcagaaccggccctacagctcccaggatgtgttcgggaacctacagcgggaacacggactgggcaaggcggtggtggtgaagacgctggagcagctggcgcaacaaggcaagatcaaagagaagatgtacggcaagcagaagatctattttgcggatcaggaccagtttgacatggtgagtgatgctgaccttcaagtcctagatggcaaaatcgtggccctcactgctaaggtgcagagcttgcagcagagctgccgctacatggaggctgagctcaaggaattatctagtgccctgaccacaccagagatgcagaaagaaatccaggagttaaagaaggaatgcgctggctacagagagagattgaagaacattaaagcagctaccaatcatgtgactccagaagagaaagagcaggtgtacagagagaggcagaagtactgtaaggagtggaggaagaggaagaggatggctacagagctgtctgatgcaatacttgaaggataccccaagagcaagaagcagttctttgaggaagttgggatagagacggatgaagattacaacgtcacactcccagacccctgaggggcccacggtcaggactggtggggactgcaggatgtcagaagagtgagatgtcttgcactggctaccttgtttttggttggcttttgttgttgttcctgctactttcacctttaagcagagcagtcaggagacaagcataaaccagagcactgggtagagaggatgagggctggtggctgggggtagacccagcccatttcattgtctaaattgcagtagcttgaggttaacatttagacttggaacaatgctaaaggaaagcatttggcaatatttattataatttaattttatataaaaatatttaatttcctctggatagtcaaacctgccagatatcaaacctgaggaaggcagaagtgaatttggagaactagggtagagagaggttgctataaaacgagcatttggagggcccacggcttcactcaggacctgctgggcttgtgtaccccaggagcccttttaagtatcttttgtacgcttttcaccccacccccaagtcctgggagaaatgcaggcaacactgagacatgggagaggccaagatatgcttgacagaaagggtgattttgaggctcagttaatatttcaaaattgtaaccgtagcaaaactgcattggtatttagaaaaataaaaaatttccaatatgtaaaaaaaaaaaaaaaaaaaa

SEQ ID NO: 53 - DNA, 2187 bp, Homo sapiens
gttgactcggccatcggcctgccgggcctggcgtttcccagaaggcccagcgccgggaaggggtttgcagctgctccgtcatcgtgcggcccgacgctatctcgcgctcgtgtgcaggcccggctcggctcctggtccccggtgcgagggttaacgcgaggccccggcctcggtccccggactaggccgtgaccccgggtgccatgaagcaggagggctcggcgcggcgccgcggcgcggacaaggcgaaaccgccgcccggcggaggagaacaagaacccccaccgccgccggccccccaggatgtggagatgaaagaggaggcagcgacgggtggcgggtcgacgggggaggcagacggcaagacggcggcggcagcggctgagcactcccagcgagagctggacacagtcaccttggaggacatcaaggagcacgtgaaacagctagagaaagcggtttcaggcaaggagccgagattcgtgctgcgggccctgcggatgctgccttccacatcacgccgcctcaaccactatgttctgtataaggctgtgcagggcttcttcacttcaaataatgccactcgagactttttgctccccttcctggaagagcccatggacacagaggctgatttacagttccgtccccgcacgggaaaagctgcgtcgacacccctcctgcctgaagtggaagcctatctccaactcctcgtggtcatcttcatgatgaacagcaagcgctacaaagaggcacagaagatctctgatgatctgatgcagaagatcagtactcagaaccgccgggccctagaccttgtagccgcaaagtgttactattatcacgcccgggtctatgagttcctggacaagctggatgtggtgcgcagcttcttgcatgctcggctccggacagctacgcttcggcatgacgcagacgggcaggccaccctgttgaacctcctgctgcggaattacctacactacagcttgtacgaccaggctgagaagctggtgtccaagtctgtgttcccagagcaggccaacaacaatgagtgggccaggtacctctactacacagggcgaatcaaagccatccagctggagtactcagaggcccggagaacgatgaccaacgcccttcgcaaggcccctcagcacacagctgtcggcttcaaacagacggtgcacaagcttctcatcgtggtggagctgttgctgggggagatccctgaccggctgcagttccgccagccctccctcaagcgctcactcatgccctatttccttctgactcaagctgtcaggacaggaaacctagccaagttcaaccaggtcctggatcagtttggggagaagtttcaagcagatgggacctacaccctaattatccggctgcggcacaacgtgattaagacaggtgtacgcatgatcagcctctcctattcccgaatctccttggctgacatcgcccagaagctgcagttggatagccccgaagatgcagagttcattgttgccaaggccatccgggatggtgtcattgaggccagcatcaaccacgagaagggctatgtccaatccaaggagatgattgacatctattccacccgagagccccagctagccttccaccagcgcatctccttctgcctagatatccacaacatgtctgtcaaggccatgaggtttcctcccaaatcgtacaacaaggacttggagtctgcagaggaacggcgtgagcgagaacagcaggacttggagtttgccaaggagatggcagaagatgatgatgacagcttcccttgagctggggggctggggaggggtagggggaatggggacaggctctttcccccttgggggtcccctgcccagggcactgtccccattttcccacacacagctcatatgctgcattcgtgcagggggtgggggtgctgggagccagccaccctgacctcccccagggctcctccccagccggtgacttactgtacagcaggcaggagggtgggcaggcaacctccccgggcagggtcctggccagcagtgtgggagcaggaggggaaggatagttctgtgtactcctttagggagtgggggactagaactgggatgtcttggcttgtatgttttttgaagcttcgattatgatttttaaacaataaaaagttctccacagtgc

SEQ ID NO: 54 - DNA, 1652 bp, Homo sapiens
aggggcgcaggcgcccaggccgggtgaggcgttcccggaggtgtccagcagaggacgctgccggcggagacgggaccggaagccgggccgcaggcggccgggcgtattcgccgactcctcccgcttccgctgccgcagccggtcgtaaccaagttgtgtcctgtcagccgctgtccccttcgccgcgatgccgctggagaacctggaggaggagggtctgcccaagaaccccgacttgcgtatcgcgcagctgcgcttcctgctcagcctgcccgagcaccgcggagacgctgccgtgcgcgacgagctgatggcggccgtccgcgataacaacttttggaacagaatccggcaagagcaaaccgaggattgccctccctccagccctagtagaggttggcattgccaggattggccgtcacgcaaacctcccaccagcatacgtttatgttttgccaagccgattattaagcgccatcgcatgccttcctacatggctccttactatgaagccttgtgcaaatccctcgactggcagatagacgtggacctactcaataaaatgaagaaggcaaatgaagatgagttgaagcgtttggatgaggagctggaagatgcagagaagaatctaggagagagcgaaattcgcgatgcaatgatggcaaaggccgagtacctctgccggataggtgacaaagagggagctctgacagcctttcgcaagacatatgacaaaactgtggccctgggtcaccgattggatattgtattctatctccttaggattggcttattttatatggataatgatctcatcacacgaaacacagaaaaggccaaaagcttaatagaagaaggaggagactgggacaggagaaaccgcctaaaagtgtatcagggtctttattgtgtggctattcgtgatttcaaacaggcagctgaactcttccttgacactgtttcaacatttacatcctatgaactcatggattataaaacatttgtgacttatactgtctatgtcagtatgattgccttagaaagaccagatctcagggaaaaggtcattaaaggagcagagattcttgaagtgttgcacagtcttccagcagttcggcagtatctgttttcactctatgaatgccgttactctgttttcttccaatcattagcggttgtggaacaggaaatgaaaaaggactggctttttgcccctcattatcgatactatgtaagagaaatgagaattcatgcatacagtcagctgctggaatcatataggtcattaacccttggctatatggcagaagcgtttggtgttggtgtggaattcattgatcaggaactgtccaggtttattgctgccgggagactacactgcaaaatagataaagtgaatgaaatagtagaaaccaacagacctgatagcaagaactggcagtaccaagaaactatcaagaaaggagatctgctactaaacagagttcaaaaactttccagagtaattaatatgtaaagccatgtaactaacaaaggatttgctttagagataattatttggaatttttatagcttacttcacaatgtgcccaggtcagctgtataaaataaatactgcattgttgtttctttccaaaaaaaaaaaaaaaaaa

SEQ ID NO: 55 - DNA, 3773 bp, Homo sapiens
aggcgcacaggtaccattttgaccgtaaacatcctgccgatttgaaccgaggatttgggcggcaggaagagccgcggcgtaacggcagccatcttgtttgtttgagtgaatcggaaaggaggcgccggctgtggcggcggcgggagctgctcggaagctacacctcgcaagggctcccccctttccccaccccctcccccgacccttttcccctccccgggccacccagcccgcccaactcccagcggagagcaaggttttcttctgttttcatagccagccagaacaatgttctacgcacattttgttctcagtaaaagagggcctctggccaaaatttggctagcggcccattgggataagaagctaaccaaagcccatgtgttcgagtgtaatttagagagcagcgtggagagtatcatctcaccaaaggtgaaaatggcattacggacatcaggacatctcttactgggagtagttcgaatctatcacaggaaagccaaataccttcttgcagactgtaatgaagcattcattaagataaagatggcttttcggccaggtgtggttgacctgcctgaggaaaatcgggaagcagcttataatgccattactttacctgaagaatttcatgactttgatcagccactgcctgacttagatgacatcgatgtggcccagcagttcagcttgaatcagagtagagtggaagagataaccatgagagaagaagttgggaacatcagtattttacaagaaaatgattttggtgattttggaatggatgatcgtgagataatgagagaaggcagtgcttttgaggatgacgacatgttagtaagcactactacttctaacctcctattagagtctgaacagagcaccagcaatctgaatgagaaaattaaccatttagaatatgaagatcaatataaggatgataattttggagaaggaaatgatggtggaatattagatgacaaacttattagtaataatgatggcggtatctttgatgatccccctgccctctctgaggcaggggtgatgttgccagagcagcctgcacatgacgatatggatgaggatgataatgtatcaatgggtgggcctgatagtcctgattcagtggatcccgttgaaccaatgccaaccatgactgatcaaacaacacttgttccaaatgaggaagaagcatttgcattggagcctattgatataactgttaaagaaacaaaagccaagaggaagaggaagctaattgttgacagtgtcaaagagttggatagcaagacaattagagcccaacttagtgattattcagatattgttactactttggatctggcaccgcccaccaagaaattgatgatgtggaaagagacaggaggagtagaaaaactgttttctttacctgctcagcctttgtggaataacagactactgaagctctttacacgctgtcttacaccgcttgtaccagaagaccttagaaaaaggaggaaaggaggagaggcagataatttggatgaattcctcaaagaatttgaaaatccagaggttcctagagaggaccagcaacagcagcatcagcagcgtgatgttatcgatgagcccattattgaagagccaagccgcctccaggagtcagtgatggaggccagcagaacaaacatagatgagtcagctatgcctccaccaccacctcagggagttaagcgaaaagctggacaaattgacccagagcctgtgatgcctcctcagcaggtagagcagatggaaataccacctgtagagcttcccccagaagaacctccaaatatctgtcagctaataccagagttagaacttctgccagaaaaagagaaggagaaagagaaggaaaaagaagatgatgaagaggaagaggatgaagatgcatcagggggcgatcaagatcaggaagaaagaagatggaacaaaaggactcagcagatgcttcatggtcttcagcgtgctcttgctaaaactggagctgaatctatcagtttgcttgagttatgtcgaaatacgaacagaaaacaagctgccgcaaagttctacagcttcttggttcttaaaaagcagcaagctattgagctgacacaggaagaaccgtacagtgacatcatcgcaacacctggaccaaggttccatattatataaggagctagaagcattatagctagtgtttgattcactagtgcttacaaattgcccccatgtgtaggggacacagaaccctttgagaaaacttagatttttgtctgtacaaagtctttgcctttttccttcttcatttttttccagtacattaaatttgtcaatttcatctttgagggaaactgattagatgggttgtgtttgtgttctgatggagaaaacagcaccccaaggactcagaagatgattttaacagttcagaacagatgtgtgcaatattggtgcatgtaataatgttgagtggcagtcaaaagtcatgatttttatcttagttcttcattactgcattgaaaaggaaaacctgtctgagaaaatgcctgacagtttaatttaaaactatggtgtaagtctttgacaagaaaaaaaaacaaacaaacacttctttccatcagtaacactggcaatcttcctgttaaccactctccttagggatggtatctgaaacaacaatggtcaccctcttgagattcgttttaagtgtaattccataatgagcagaggtgtacgcgaaattgtgttatgactgatagccttcagctacaaaaagataggactgacctggtttaaagtgttctattttgtaaatcattccatttgagtctttctgatgaacttggctatactgaaatctgttattttagtgaggctccaaaatgagcaaagctaggcctgattagagtagagtgactattaaaaaacataactttctaggagctataaatcaaagttttaaaaagatgtttggatatatttgagtattccgatcatgaaaacagaaattgccctgcctactacaaggacagactgatgggaaattatgcacctggtcaacttagcttttaagcagacgatgctgtaaaaactaacggcttctctgatatttattgtaagttttagtactgatctccttttccagtgctgcacactcctggtttggaactttaatagcgttgcaacgaaatcctatatccagtttcctgtaatttaattgaagaaaaatacatccaaataaagactttattattaacagaccagatagcatcagaaatcatgtgactgttatgattatcagaatgtcttaactttttagggcaaagttaacactgaaagttctagcttaagtgttgaaacttttgtgggaaaaaaaaatcacttttgaaactcagacttcagtgtatacccaataatttaaaattatgtgaaatgttttaaatttgtgaactcgtaattactgttttaatgattcagtttcttcagagtggtaattgtataaaattgctattgcagctttacattcaatatgatgtgcctgtaaaccaaggagttttccccgtttgtaaaaagacattgtagataattgaatgtttgattttagaaaggtcattagtttcttgttacacattttgttagtctggtttttgttgcttatcgggtttaatattgttcttgaaaatagttgatgctatgttatgtataacttttctaataaaagttgtgttataagctgtaaaaaaaaaaaaaaaaaaaaaaaa

SEQ ID NO: 56 - DNA, 1818 bp, Homo sapiens
ggtggtcagcgcgcgcattgcctgccccggaagtggtcggcgcgcggcgcggcgcgcctgggcgctaagatggcggcggcgtgagttgcatgttgtgtgaggatcccggggccgccgcgtcgctcgggccccgccatggccgtcaccatcacgctcaaaacgctgcagcagcagaccttcaagatccgcatggagcctgacgagacggtgaaggtgctaaaggagaagatagaagctgagaagggtcgtgatgccttccccgtggctggacagaaactcatctatgccggcaagatcttgagtgacgatgtccctatcagggactatcgcatcgatgagaagaactttgtggtcgtcatggtgaccaagaccaaagccggccagggtacctcagcacccccagaggcctcacccacagctgccccagagtcctctacatccttcccgcctgcccccacctcaggcatgtcccatcccccacctgccgccagagaggacaagagcccatcagaggaatccgcccccacgacgtccccagagtctgtgtcaggctctgttccctcttcaggtagcagcgggcgagaggaagacgcggcctccacgctagtgacgggctctgagtatgagacgatgctgacggagatcatgtccatgggctatgagcgagagcgggtcgtggccgccctgagagccagctacaacaacccccaccgagccgtggagtatctgctcacgggaattcctgggagccccgagccggaacacggttctgtccaggagagccaggtatcggagcagccggccacggaagcaggagagaaccccctggagttcctgcgggaccagccccagttccagaacatgcggcaggtgattcagcagaaccctgcgctgctgcccgccctgctccagcagctgggccaggagaaccctcagcttttacagcaaatcagccggcaccaggagcagttcatccagatgctgaacgagccccctggggagctggcggacatctcagatgtggagggggaggtgggcgccataggagaggaggccccgcagatgaactacatccaggtgacgccgcaggagaaagaagctatagagaggttgaaggccctgggcttcccagagagcctggtcatccaggcctatttcgcgtgtgaaaaaaatgagaacttggctgccaacttcctcctgagtcagaactttgatgacgagtgatgccaggaagccaggccaccgaagcccccaccctacccttattccatgaaagttttataaaagaaaaaatatatatatattcatgtttatttaagaaatggaaaaaaaaatcaaaaatcttaaaaaaacaagcaaacagtccagcttcctgtcctcctaaagtggcccctgttcccatctcccgggccagacagctgtccccccgtcctcctccccagcccagcctgctcagagaagctggcaggactgggaggcgacagatgggcccctcttggcctctgtcccagctctctgcagccagacggaaaggcggctgcttgcctctccatcctccgaaaaacccctgaggacccccccccatcctcttctaggatgaggggaagctggagccccaactttgatcctccattggagtggcccaaatctttccatctagggcaagtcctgaaaggcccaaggccccctccccagtctggccttggcctccagcctggagaagggctaacatcagctcattgtcaaggccacccccaccccagaacagaaccgtgtctctgataaaggttttgaagtgaataaagttttaaaaactag

SEQ ID NO: 57 - DNA, 6597 bp, Homo sapiens
tttcccggcgtgccccaggagagcggcgtggacgcgtgcgggcctagaggcccacgtgatccgcagggcggccgaggcaggaagctgtgagtgcgcggttgcggggtcgcattgtggctacggctttgcgtccccggcgggcagccccaggctggtccccgcctccgctctccccaccggcggggaaagcagctggtgtgggaggaaaggctccatcccccgccccctctctcccgctgttggctggcaggatcttttggcagtcctgtggcctcgctccccgcccggatcctcctgaccctgagattcgcgggtctcacgtcccgtgcacgccttgcttcggcctcagttaagcctttgtggactccaggtccctggtgagattagaaacgtttgcaaacatgtcccggatcgaaaagatgagcattctgggcgtgcggagttttggaatagaggacaaagataagcaaattatcactttcttcagcccccttacaattttggttggacccaatggggcgggaaagacgaccatcattgaatgtctaaaatatatttgtactggagatttccctcctggaaccaaaggaaatacatttgtacacgatcccaaggttgctcaagaaacagatgtgagagcccagattcgtctgcaatttcgtgatgtcaatggagaacttatagctgtgcaaagatctatggtgtgtactcagaaaagcaaaaagacagaatttaaaactctggaaggagtcattactagaacaaagcatggtgaaaaggtcagtctgagctctaagtgtgcagaaattgaccgagaaatgatcagttctcttggggtttccaaggctgtgctaaataatgtcattttctgtcatcaagaagattctaattggcctttaagtgaaggaaaggctttgaagcaaaagtttgatgagattttttcagcaacaagatacattaaagccttagaaacacttcggcaggtacgtcagacacaaggtcagaaagtaaaagaatatcaaatggaactaaaatatctgaagcaatataaggaaaaagcttgtgagattcgtgatcagattacaagtaaggaagcccagttaacatcttcaaaggaaattgtcaaatcctatgagaatgaacttgatccattgaagaatcgtctaaaagaaattgaacataatctctctaaaataatgaaacttgacaatgaaattaaagccttggatagccgaaagaagcaaatggagaaagataatagtgaactggaagagaaaatggaaaaggtttttcaagggactgatgagcaactaaatgacttatatcacaatcaccagagaacagtaagggagaaagaaaggaaattggtagactgtcatcgtgaactggaaaaactaaataaagaatctaggcttctcaatcaggaaaaatcagaactgcttgttgaacagggtcgtctacagctgcaagcagatcgccatcaagaacatatccgagctagagattcattaattcagtctttggcaacacagctagaattggatggctttgagcgtggaccattcagtgaaagacagattaaaaattttcacaaacttgtgagagagagacaagaaggggaagcaaaaactgccaaccaactgatgaatgactttgcagaaaaagagactctgaaacaaaaacagatagatgagataagagataagaaaactggactgggaagaataattgagttaaaatcagaaatcctaagtaagaagcagaatgagctgaaaaatgtgaagtatgaattacagcagttggaaggatcttcagacaggattcttgaactggaccaggagctcataaaagctgaacgtgagttaagcaaggctgagaaaaacagcaatgtagaaaccttaaaaatggaagtaataagtctccaaaatgaaaaagcagacttagacaggaccctgcgtaaacttgaccaggagatggagcagttaaaccatcatacaacaacacgtacccaaatggagatgctgaccaaagacaaagctgacaaagatgaacaaatcagaaaaataaaatctaggcacagtgatgaattaacctcactgttgggatattttcccaacaaaaaacagcttgaagactggctacatagtaaatcaaaagaaattaatcagaccagggacagacttgccaaattgaacaaggaactagcttcatctgagcagaataaaaatcatataaataatgaactaaaaagaaaggaagagcagttgtccagttacgaagacaagctgtttgatgtttgtggtagccaggattttgaaagtgatttagacaggcttaaagaggaaattgaaaaatcatcaaaacagcgagccatgctggctggagccacagcagtttactcccagttcattactcagctaacagacgaaaaccagtcatgttgccccgtttgtcagagagtttttcagacagaggctgagttacaagaagtcatcagtgatttgcagtctaaactgcgacttgctccagataaactcaagtcaacagaatcagagctaaaaaaaaaggaaaagcggcgtgatgaaatgctgggacttgtgcccatgaggcaaagcataattgatttgaaggagaaggaaataccagaattaagaaacaaactgcagaatgtcaatagagacatacagcgcctaaagaacgacatagaagaacaagaaacactcttgggtacaataatgcctgaagaagaaagtgccaaagtatgcctgacagatgttacaattatggagaggttccagatggaacttaaagatgttgaaagaaaaattgcacaacaagcagctaagctacaaggaatagacttagatcgaactgtccaacaagtcaaccaggagaaacaagagaaacagcacaagttagacacagtttctagtaagattgaattgaatcgtaagcttatacaggaccagcaggaacagattcaacatctaaaaagtacaacaaatgagctaaaatctgagaaacttcagatatccactaatttgcaacgtcgtcagcaactggaggagcagactgtggaattatccactgaagttcagtctttgtacagagagataaaggatgctaaagagcaggtaagccctttggaaacaacattggaaaagttccagcaagaaaaagaagaattaatcaacaaaaaaaatacaagcaacaaaatagcacaggataaactgaatgatattaaagagaaggttaaaaatattcatggctatatgaaagacattgagaattatattcaagatgggaaagacgactataagaagcaaaaagaaactgaacttaataaagtaatagctcaactaagtgaatgcgagaaacacaaagaaaagataaatgaagatatgagactcatgagacaagatattgatacacagaagatacaagaaaggtggctacaagataaccttactttaagaaaaagaaatgaggaactaaaagaagttgaagaagaaagaaaacaacatttgaaggaaatgggtcaaatgcaggttttgcaaatgaaaagtgaacatcagaagttggaagagaacatagacaatataaaaagaaatcataatttggcattagggcgacagaaaggttatgaagaagaaattattcattttaagaaagaacttcgagaaccacaatttcgggatgctgaggaaaagtatagagaaatgatgattgttatgaggacaacagaacttgtgaacaaggatctggatatttattataagactcttgaccaagcaataatgaaatttcacagtatgaaaatggaagaaatcaataaaattatacgtgacctgtggcgaagtacctatcgtggacaagatattgaatacatagaaatacggtctgatgccgatgaaaatgtatcagcttctgataaaaggcggaattataactaccgagtggtgatgctgaagggagacacagccttggatatgcgaggacgatgcagtgctggacaaaaggtattagcctcactcatcattcgcctggccctggctgaaacgttctgcctcaactgtggcatcattgccttggatgagccaacaacaaatcttgaccgagaaaacattgaatctcttgcacatgctctggttgagataataaaaagtcgctcacagcagcgtaacttccagcttctggtaatcactcatgatgaagattttgtggagcttttaggacgttctgaatatgtggagaaattctacaggattaaaaagaacatcgatcagtgctcagagattgtgaaatgcagtgttagctccctgggattcaatgttcattaaaaatatccaagatttaaatgccatagaaatgtaggtcctcagaaagtgtataataagaaacttatttctcatatcaacttagtcaataagaaaatatattctttcaaaggaacattgtgtctaggattttggatgttgagaggttctaaaatcatgaaacttgtttcactgaaaattggacagattgcctgtttctgatttgctgctcttcatcccattccaggcagcctctgtcaggccttcagggttcagcagtacagccgagactcgactctgtgcctccctccccagtgcaaatgcatgcttcttctcaaagcactgttgagaaggagataattactgccttgaaaatttatggttttggtatttttttaaatcatagttaaatgttacctctgaatttacttccttgcatgtggtttgaaaaactgagtattaatatctgaggatgaccagaaatggtgagatgtatgtttggctctgcttttaactttataaatccagtgacctctctctctgggacttggtttccccaactaaaatttgaagtagttgaatggggtctcaaagtttgacaggaaccttaagtaatcatctaagtcagtacccaccaccttcttctcctacatatcccttccagatggtcatccagactcagagctctctctacagagaggaaattctccactgtgcacacccacctttggaaagctctgaccacttgaggcctgatctgcccatcgtgaagaagcctgtaacactcctctgcgtctatcctgtgtagcatactggcttcaccatcaatcctgattcctctctaagtgggcattgccatgtggaaggcaagccaggctcactcacagagtcaaggcctgctccctgtagggtccaaccagacctggaagaacaggcctctccatttgctcttcagatgccacttctaagaaaagcctaatcacagtttttcctggaattgccagctgacatcttgaatccttccattccacacagaatgcaaccaagtcacacgcttttgaattatgctttgtagagttttgtcattcagagtcagccaggaccataccgggtcttgattcagtcacatggcatggttttgtgccatctgtagctataatgagcatgtttgcctagacagcttttctcaactgggtccagaagagaattaagccctaaggtcctaaggcatctatctgtgctaggttaaatggttggcccccaaagatagacaggtcctgatttctagaacccgtgactgttactttatacagcaaaggaaactttgcagatgtgattaaagctaaggaccttaagacagagtatcctgggggtggtggtggggtgggggggggtcctaaatgtaatcacgagtaagattaagagcaaatcaattctagtcatatattaaacatccacaataaccaagatatttttatcccaagaatgcaagatttcagaaaatgaaaaatctgttgataaatccatcactataataaaaccgaaggtgaaaaaaattctgaaaaaattctagcagctatatttgataaaattcaacatctcctagctttagcaaactcacagttttgcaaataatattttcttaatgttatctgttgctaaatcaaaattaaacagtcatcttaactgcaaaataaaacatttctcagtaaatattaaagccagttaccttctatcaacatgttaatgaaagtgctagttgttgcagcaaagaataacaaaggcaatacacgatcaatataggcagtgaaacaaaagtatcatttgcaagttaaaacagacttcccaattttaaatctggtttccccctgaatatgtggcatccttggcagcacttctgagagtggctgctttcattccaagaagcccatgggtttggaggtgggataggtgcctttctggcttctcattgctgcttctagatcagtctccaaatatcccccttccccacattggaatgaatagccatcacagcatggatggaggttagaatgagccagactgcctgggctcaaatcctagcacaccactcactagctggggaccttgagcaagttatttgtcctgttttctgtttccttatatgtaaaagtgggtaaaatggtacatattttgtagggttgttatgaagattgaatgacattatttacaaactgcttagaactgcttgccacctactaaatactgtgtaagtgttcaagaaaaagctgtcttcatttca

SEQ ID NO: 58 - DNA, 2147 bp, Homo sapiens
gaaagccgctggcggaccgcgcgcagcggccagagaccgagccctaaggagagtgcggcgcttcccgaggcgtgcagctgggaactgcaactcatctgggttgtgcgcagaaggctggggcaagcgagtagagaagtggagctaatggcaatgcagatgcagcttgaagcaaatgcagatacttcagtggaagaagaaagctttggcccacaacccatttcacggttagagcagtgtggcataaatgccaacgatgtgaagaaattggaagaagctggattccatactgtggaggctgttgcctatgcgccaaagaaggagctaataaatattaagggaattagtgaagccaaagctgataaaattctgacggagtctcgctctgttgccaggctggagtgcaatagcgtgatcttggtctactgcaccctccgcctctcaggttcaagtgattctcctgcctcagcctcccgagtagttgggactacaggtggaattgagactggatctatcacagaaatgtttggagaattccgaactgggaagacccagatctgtcatacgctagctgtcacctgccagcttcccattgaccggggtggaggtgaaggaaaggccatgtacattgacactgagggtacctttaggccagaacggctgctggcagtggctgagaggtatggtctctctggcagtgatgtcctggataatgtagcatatgctcgagcgttcaacacagaccaccagacccagctcctttatcaagcatcagccatgatggtagaatctaggtatgcactgcttattgtagacagtgccaccgccctttacagaacagactactcgggtcgaggtgagctttcagccaggcagatgcacttggccaggtttctgcggatgcttctgcgactcgctgatgagtttggtgtagcagtggtaatcactaatcaggtggtagctcaagtggatggagcagcgatgtttgctgctgatcccaaaaaacctattggaggaaatatcatcgcccatgcatcaacaaccagattgtatctgaggaaaggaagaggggaaaccagaatctgcaaaatctacgactctccctgtcttcctgaagctgaagctatgttcgccattaatgcagatggagtgggagatgccaaagactgaatcattgggtttttcctctgttaaaaaccttaagtgctgcagcctaatgagagtgcactgctccctggggttctctacaggcctcttcctgttgtgactgccaggataaagcttccgggaaaacagctattatatcagcttttctgatggtataaacaggagacaggtcagtagtcacaaactgatctaaaatgtttattccttctgtagtgtattaatctctgtgtgttttctttggttttggaggaggggtatgaagtatctttgacatggtgccttaggaatgacttgggtttaacaagctgtctactggacaatcttatgtttccaagagaactaaagctggagagacctgacccttctctcacttctaaattaatggtaaaataaaatgcctcagctatgtagcaaagggaatgggtctgcacagattctttttttctgtcagtaaaactctcaagcaggtttttaagttgtctgtctgaatgatcttgtgtaaggttttggttatggagtcttgtgccaaacctactaggccattagcccttcaccatctacctgcttggtctttcattgctaagactaactcaagataatcctagagtcttaaagcatttcaggccagtgtggtgtcttgcgcctgtactcccagcactttgggaggccgaggcaggtggatcgcttgagcccaggagttttaagtccagcttggccaaggtggtgaaatcccatctctacaaaaaatgcagaacttaatctggacacactgttacacgtgcctgtagtcccagctactcgatagcctgaggtgggagaatcacttaagcctggaaggtggaagttgcagtgagtcgagattgcactgctgcattccagccagggtgacagagtgagaccatgtttcaaacaagaaacatttcagagggtaagtaaacagatttgattgtgaggcttctaataaagtagttattagtagtgaa

SEQ ID NO: 59 - DNA, 1888 bp, Homo sapiens
gttgctttgcggcgttttccgcggggaaactgtgtaaagggtggggaaacttgaaagttggatgctgcagacccggcatgggtagcaagaaactaaaacgagtgggtttatcacaagagctgtgtgaccgtctgagtagacatcagatccttacctgtcaggactttttatgtctttccccactggagcttatgaaggtgactggtctgagttatcgaggtgtccatgaacttctatgtatggtcagcagggcctgtgccccaaagatgcaaacggcttatgggataaaagcacaaaggtctgctgatttctcaccagcattcttatctactaccctttctgctttggacgaagccctgcatggtggtgtggcttgtggatccctcacagagattacaggtccaccaggttgtggaaaaactcagttttgtataatgatgagcattttggctacattacccaccaacatgggaggattagaaggagctgtggtgtacattgacacagagtctgcatttagtgctgaaagactggttgaaatagcagaatcccgttttcccagatattttaacactgaagaaaagttacttttgacaagtagtaaagttcatctttatcgggaactcacctgtgatgaagttctacaaaggattgaatctttggaagaagaaattatctcaaaaggaattaaacttgtgattcttgactctgttgcttctgtggtcagaaaggagtttgatgcacaacttcaaggcaatctcaaagaaagaaacaagttcttggcaagagaggcatcctccttgaagtatttggctgaggagttttcaatcccagttatcttgacgaatcagattacaacccatctgagtggagccctggcttctcaggcagacctggtgtctccagctgatgatttgtccctgtctgaaggcacttctggatccagctgtgtgatagccgcactaggaaatacctggagtcacagtgtgaatacccggctgatcctccagtaccttgattcagagagaagacagattcttattgccaagtcccctctggctcccttcacctcatttgtctacaccatcaaggaggaaggcctggttcttcaagcctatggaaattcctagagacagataaatgtgcaaacctgttcatcttgccaagaaaaatccgcttttctgccacagaaacaaaatattgggaaagagtcttgtggtgaaacacccatcgttctctgctaaaacatttggttgctactgtgtagactcagcttaagtcatggaattctagaggatgtatctcacaagtaggatcaagaacaagcccaacagtaatctgcatcataagctgatttgataccatggcactgacaatgggcactgatttgataccatggcactgacaatgggcacacagggaacaggaaatgggaatgagagcaagggttgggttgtgttcgtggaacacataggttttttttttttaactttctctttctaaaatatttcattttgatggaggtgaaatttatataagatgaaattaaccattttaaagtaaacaattccgtggcaactagatatcatgatgtgcaaccagcatctctgtctagttccaaatattttcatcaccccaaaagcaagacccataaccattatgcaagtgttcctatttccccctcctcccagctcctggaaacccaccaatctactttgttgctatggctttacctattctggatatttcatataaatggaatcatatagtgtctgtcttctttcactagtatgttttcaagtctcctccatggtgtagcgtgcatcagtacttcattctttttatggctgaataatattgcattgtcaggaaaaaaaaaaaaaaaaaa

SEQ ID NO: 60 - DNA, 666 bp, Homo sapiens
gacgtcacgccgcacgccccagcgagggcgtgcggagtttggctgctccggggttagcaggtgagcctgcgatgcgcgggaagacgttccgctttgaaatgcagcgggatttggtgagtttcccgctgtctccagcggtgcgggtgaagctggtgtctgcggggttccagactgctgaggaactcctagaggtgaaaccctccgagcttagcaaagaagttgggatatctaaagcagaagccttagaaactctgcaaattatcagaagagaatgtctcacaaataaaccaagatatgctggtacatctgagtcacacaagaagtgtacagcactggaacttcttgagcaggagcatacccagggcttcataatcaccttctgttcagcactagatgatattcttgggggtggagtgcccttaatgaaaacaacagaaatttgtggtgcaccaggtgttggaaaaacacaattatggtaaaataaagtgttctccttttaagggtgggtttaataacatattatgaaagtagtattttgtactatcgtcaggaaaccaaataagatatatatgtgctcttaattttaagtgtgtatgtgcattaaacaaaaattagcttactatttgtgttacttcattatcccttcttgataaatgtatgcaatta

SEQ ID NO: 61 - DNA, 3279 bp, Homo sapiens
gacgtcgcgcgggctcccgggcggggcgggtccggccgcctccgagcccggccggcagcccccggccttaaagcgcgggctgtccggaggggtcggctttcccaccgaggatttggcactctggtgagggaaaagggcgaaagagaaaagcgagcagccgtcctttcacagcctcagaaagtgctcgcttcccttcgggggctttcgcgaatcccgaggcaatctcggaggcggtatttgacctgtccaaagacgacttgatacctctataatgtaacagaaaaggtcagaaaatattaagcaagtagaagtgtggagcatattaagcaagatgaacatctcgggaagcagctgtggaagccctaactctgcagatacatctagtgactttaaggacctttggacaaaactaaaagaatgtcatgatagagaagtacaaggtttacaagtaaaagtaaccaagctaaaacaggaacgaatcttagatgcacaaagactagaagaattcttcaccaaaaatcaacagctgagggaacagcagaaagtccttcatgaaaccattaaagttttagaagatcggttaagagcaggcttatgtgatcgctgtgcagtaactgaagaacatatgcggaaaaaacagcaagagtttgaaaatatccggcagcagaatcttaaacttattacagaacttatgaatgaaaggaatactctacaggaagaaaataaaaagctttctgaacaactccagcagaaaattgagaatgatcaacagcatcaagcagctgagcttgaatgtgaggaagacgttattccagattcaccgataacagccttctcattttctggcgttaaccggctacgaagaaaggagaacccccatgtccgatacatagaacaaacacatactaaattggagcactctgtgtgtgcaaatgaaatgagaaaagtttccaagtcttcaactcatccacaacataatcctaatgaaaatgaaattctagtagctgacacttatgaccaaagtcaatctccaatggccaaagcacatggaacaagcagctatacccctgataagtcatcttttaatttagctacagttgttgctgaaacacttggacttggtgttcaagaagaatctgaaactcaaggtcccatgagcccccttggtgatgagctctaccactgtctggaaggaaatcacaagaaacagccttttgaggaatctacaagaaatactgaagatagtttaagattttcagattctacttcaaagactcctcctcaagaagaattacctactcgagtgtcatctcctgtatttggagctacctctagtatcaaaagtggtttagatttgaatacaagtttgtccccttctcttttacagcctgggaaaaaaaaacatctgaaaacactcccttttagcaacacttgtatatctagattagaaaaaactagatcaaaatctgaagatagtgcccttttcacacatcacagtcttgggtctgaagtgaacaagatcattatccagtcatctaataaacagatacttataaataaaaatataagtgaatccctaggtgaacagaataggactgagtacggtaaagattctaacactgataaacatttggagcccctgaaatcattgggaggccgaacatccaaaaggaagaaaactgaggaagaaagtgaacatgaagtaagctgcccccaagcttcttttgataaagaaaatgctttcccttttccaatggataatcagttttccatgaatggagactgtgtgatggataaacctctggatctgtctgatcgattttcagctattcagcgtcaagagaaaagccaaggaagtgagacttctaaaaacaaatttaggcaagtgactctttatgaggctttgaagaccattccaaagggcttttcctcaagccgtaaggcctcagatggcaactgcacgttgcccaaagattccccaggggagccctgttcacaggaatgcatcatccttcagcccttgaataaatgctctccagacaataaaccatcattacaaataaaagaagaaaatgctgtctttaaaattcctctacgtccacgtgaaagtttggagactgagaatgttttagatgacataaagagtgctggttctcatgagccaataaaaatacaaaccaggtcagaccatggaggatgtgaacttgcatcagttcttcagttaaatccatgtagaactggtaaaataaagtctctacaaaacaaccaagatgtatcctttgaaaatatccagtggagtatagatccgggagcagacctttctcagtataaaatggatgttactgtaatagatacaaaggatggcagtcagtcaaaattaggaggagagacagtggacatggactgtacattggttagtgaaaccgttctcttaaaaatgaagaagcaagagcagaagggagaaaaaagttcaaatgaagaaagaaaaatgaatgatagcttggaagatatgtttgatcggacaacacatgaagagtatgaatcctgtttggcagacagtttctcccaagcagcagatgaagaggaggaattgtctactgccacaaagaaactacacactcatggtgataaacaagacaaagtcaagcagaaagcgtttgtggagccgtattttaaaggtgatgaaagagagactagcttgcaaaattttcctcatattgaggtggttcggaaaaaagaggagagaagaaaactgcttgggcacacgtgtaaggaatgtgaaatttattatgcagatatgccagcagaagaaagagaaaagaaattggcttcctgctcaagacaccgattccgctacattccacccaacacaccagagaatttttgggaagttggttttccttccactcagacttgtatggaaagaggttatattaaggaagatcttgatccttgtcctcgtccaaaaagacgtcagccttacaacgcaatattttctccaaaaggcaaggagcagaagacatagacgttgaaacagaaacagaaggatgaaggacagttttttccttcttagttatttatagttaaagttggtactaaacattgatttttttgatcttctgtaaatggatttataaatcagttttctattgaaaatgtttgtgatattttgcttttgcacctttaaaacaataaggcgctttcattttgcactctaacttaagagtttttactttatgtagtgatacctaatacaattttgaaaatacaaaaaaaaaa

SEQ ID NO: 62 - DNA, 4345 bp, Homo sapiens
gggggcgggagcggtgcgcgcaacttctcgggccaataactgcgcagcgcgcgggacccgggtggggaagctggagctgttgcggggtccgcggggaagtcttggcggtggagccatggtcggccaactgagcgagggggccattgcggccatcatgcagaagggggatacaaacataaagcccatcctccaagtcatcaacatccgtcccattactacggggaatagtccgccgcgttatcgactgctcatgagtgatggattgaacactctatcctctttcatgttggcgacacagttgaaccctctcgtggaggaagaacaattgtccagcaactgtgtatgccagattcacagatttattgtgaacactctgaaagacggaaggagagtagttatcttgatggaattagaagttttgaagtcagctgaagcagttggagtgaagattggcaatccagtgccctataatgaaggactcgggcagccgcaagtagctcctccagcgccagcagccagcccagcagcaagcagcaggccccagccgcagaatggaagctcgggaatgggttctactgtttctaaggcttatggtgcttcaaagacatttggaaaagctgcaggtcccagcctgtcacacacttctgggggaacacagtccaaagtggtgcccattgccagcctcactccttaccagtccaagtggaccatttgtgctcgtgttaccaacaaaagtcagatccgtacctggagcaactcccgaggggaagggaagcttttctccctagaactggttgacgaaagtggtgaaatccgagctacagctttcaatgagcaagtggacaagttctttcctcttattgaagtgaacaaggtgtattatttctcgaaaggcaccctgaagattgctaacaagcagttcacagctgttaaaaatgactacgagatgaccttcaataacgagacttccgtcatgccctgtgaggacgaccatcatttacctacggttcagtttgatttcacggggattgatgacctcgagaacaagtcgaaagactcacttgtagacatcatcgggatctgcaagagctatgaagacgccactaaaatcacagtgaggtctaacaacagagaagttgccaagaggaatatctacttgatggacacatccgggaaggtggtgactgctacactgtggggggaagatgctgataaatttgatggttctagacagcccgtgttggctatcaaaggagcccgagtctctgatttcggtggacggagcctctccgtgctgtcttcaagcactatcattgcgaatcctgacatcccagaggcctataagcttcgtggatggtttgacgcagaaggacaagccttagatggtgtttccatctctgatctaaagagcggcggagtcggagggagtaacaccaactggaaaaccttgtatgaggtcaaatccgagaacctgggccaaggcgacaagccggactactttagttctgtggccacagtggtgtatcttcgcaaagagaactgcatgtaccaagcctgcccgactcaggactgcaataagaaagtgattgatcaacagaatggattgtaccgctgtgagaagtgcgacaccgaatttcccaatttcaagtaccgcatgatcctgtcagtaaatattgcagattttcaagagaatcagtgggtgacttgtttccaggagtctgctgaagctatccttggacaaaatgctgcttatcttggggaattaaaagacaagaatgaacaggcatttgaagaagttttccagaatgccaacttccgatctttcatattcagagtcagggtcaaagtggagacctacaacgacgagtctcgaattaaggccactgtgatggacgtgaagcccgtggactacagagagtatggccgaaggctggtcatgagcatcaggagaagtgcattgatgtgagaggagcagtgccaatcgggcagaagtttgcaaataggcagaatggaatcgatttcctcccacctccgtgtgacgatcccatgttagctacacagtgcagaggctcttgatggtggactaagcaatttcccccctcgtgcgcatctcagaacccatcggtaggcaaaggaaaatacgctcaggtggttgtggtgtagactgtgtcaggcctacggagtcagccagtggctagcgcaagaccagtcactccctctgccttcaggcttctgtcaatttcattatcatcaagcaggaattatgtcgtaagtcactgaccctaactgcagaccatgaagtaaattatgtaactaggtttttgcttctccagtggtgaccacccccccccatccccgctcacaacttgggttcttctcagcggggcgagctgagaagcggtcatgagcacctggggattttagtaagtgtgtcttcctagaattcgaaggctctctctttctagaggtgctacatagttggtaatgcttggaatggcaatagggtagaatgattaatcaaaggcatatcttctatatctgaagagtatccttccttcagggtttaatagactgagtcagatgggtctgatattaatcaaaattgtctcttctgaggaccgctgataagcattgacttgccgtcccctaaggaaatccgagcggctacaaagcgtttctttacttctcacttcaattaatgctgcgcttcgcttggtgagtgcgtactttttctacctgtacacattcctgcattcatgtattttgttttttttgactaaagctatgttacatggaaaggattttgaagccttttgtttcccttgctttgttttaataaacagtatattctttggttgtgaatcctactttctttgaatgcaaagagttcctataactggaaagcaattaattagccttcataataaatgttcacttgggggggatgttaactcattataaacccgaagattagtccaaggcatggagatccttcttcctagtgtttgcagccctgaaatgcatctttcaaagcatgaaaacactaaaaacaaaaagccattttgcctgaggatgctgatgatctggcacttgggattttattgatgtttacgcagcagtctaacaccaaccacgctttgaaatgtgtacagacagtgagctggtaagaaaacagtaattatgctagtgggcctttcagtcagcaaaagcatgctcgctctgtgtgttcctaatcatattaattatctatccggtggctgcaacacaccgcctgccattggccgcacatctcgccgtcgtaccccggcagtgcggcggtcactctgcagccagaggacctgctgttcatcactgcacatgccgcctgcggaggcttttggatatggggagtgatggtgtcctgtctgtctcccccctcggtgtctgccgttgacataggggccagccagccctagacgggatgacttccgttcctgaggacagacacagagggactcctgctcagcctcactaattgtttagacacattccttcctacccttctctagtctcaggagatggtaactgggtcgcatttcagtctctgactgaggcctcagccatttttacggaagttcttttctgtctgaccttgcttataaagcatcgacgagaaaattacagtcttcaaccctcttctggattgacaaattgtggctgggaagtggcgatctagctttcagcccagtaaccagtctttcatgcctactactcccagcattccctcctctccccacgtgtctgtccacacagtgaagaggcctgaccagccgtggtaccaggacaggacgtgtccagggaacgctgacacctgtcctcgcgccttctcagtggccagcgtgatgaaaccagcacgtctccgtggatgtgattgggaacccaggggcagtgccagggggagggctccctcgaggaggctgtttctaacagatttccccactcaaagatcagatcaccagcagaggagcatcagaaactggctccactgttgggcttttcagagattttggtccctgcgggttgcctaaatagattctggcccacagtttacctcgaaaggctgttgatgttgttctgtttctcctctttcacttagagatcaatgttgattttgcgtacaccatgacatcagcgttaggcaattaggagaaaaaaatctaatcatttcgcctttatttcaagtggttcttgaattccctccagtctcattgtgaaaggggcagggaaaaaaataaaagggtaataatctgatttctgtccatatttccagtgttttatgctttccattaaaaccttgctaatctct

SEQ ID NO: 63 - DNA, 1970 bp, Homo sapiens
gttctgattggttgatttcttgcgataccgctctgccagccccttgcttccgctagtgcggagggttttgcccttcgtaaagatggccgcggaggcttttggagccaactgggagcgcagtacgcgttttctggagcatgggcagaggagacaggaacaagcgtagcatccgtgagcaccgattggctgaagcgagcaccccgggagctgactggctccgccattcgcgggaaggcgtttgtggtgccagagaaaagtagccagagcggcgcagtggcggccgcgttctgtggttttccgctattcccccagacccgcaccttctcggcctctttgcggagaatcgtgaccaagatgtggaacagtggattcgaaagctatggcagctcctcatacgggggagccggcggctacacgcagtccccggggggctttggatcgcccgcaccttctcaagccgaaaagaaatcagtaggttgaaaggagtatttagttttgttttatcctgtcctgaagtccctgagtcatctatgacagaaactttatgctttgaaggaagatttcaacgtgaactgatgcgataatgatctattattatctgcatctcttataattaagtgctagagcccgagcccagcacattgtgccctgtactatatctcagctgctttctgccactttggttgatgaagtgttcagaattgggaatgttgagatttcacaggtcactattgtggggatcatcagacatgcagagaaggctccaaccaacattgtttacaaaatagatgacatgacagctgcacccatggacgttcgccagtgggttgacacagatgacaccagcagtgaaaacactgtggttcctccagaaacatatgtgaaagtggcaggccacctgagatcttttcagaacaaaaagagcctggtagcctttaagatcatgcccctggaggatatgaatgagttcaccacacatattctggaagtgatcaatgcacacatggtactaagcaaagccaacagccagccctcagcagggagagcacctatcagcaatccaggaatgagtgaagcagggaactttggtgggaatagcttcatgccagcaaatggcctcactgtggcccaaaaccaggtgttgaatttgattaaggcttgtccaagacctgaagggttgaactttcaggatctcaagaaccagctgaaacacatgtctgtatcctcaatcaagcaagctgtggattttctgagcaatgaggggcacatctattctactgtggatgatgaccattttaaatccacagatgcagaataactggatctaactgggtacctgagatattttacagctggacctagtttcacaatctgttgtctccagctctgcatatgtctggccagggggcttctaggaagtaggtttcatctatcaaatgtctcctctgacttccttttgaaacttactgctcttctgttttattttgttttgtttgaagctcagagggagatgggcaattgacagggatgcaatccagggtgggatttcttgaggaagttacaaataagcttgttacaacatcaagatagatggaattggaaggatgctaccaggagagtacttacatagtgctcaggagtttctcttcttaaaatgtttactgctgaaagatgagcaggaccagggcgttataggcagagccctagccgagaaacctgctggcctctgcctgttttcatttcccactttggttgtgtggcattactttcagaattgcactttcctgcttgtcatgactttttgacacacttgccatgacgtgtgtttctgtgaacatgaagttctgcggtagtgcctccaggggcagaggaaaagaagaagtgttactgcattttgtacaaaataaatacagtcatatgtttaataaaacagttctattgtagtaacttgtaaaaaaaaaaaaaaaaaa

SEQ ID NO: 64 - DNA, 1613 bp, Homo sapiens
aagctactcagataagaggctccaagaggacatttttggatgtgaaaaacaatgagaaggaggacaacacacatttacaatcgtcttaattttgtactcagaaaaaggatgtgaagacaatgcacagggaatacaatagtttcagatctgtgtacagtttccttttgcttcatctcctgcaacaatgtaatgaagacaccatgatatcattaacatttcacacaaaaggaaaatgaggctgaaatggtgtgggcaaggcccaggaatctggagcatccctaaccaagcagcagagcacctgggatagagaaagtgctcaagaatgttcacttactgattactacaatcaaaaaaagatacgacactaatttaccacattcttcttacttattttatgagatactattcttccaaggtggagaaagtggagaaagtagagtgacgcagctaagggagtaaatcgaccctcagccaacaagtggcaaaagcctgaagaaagtgatcaagatcactgatgaccccgcggcccatctccaagggggcgggtatcacaaccccgacgccacaccacgtatcattccgcaaaactcccgcgcctcccacgcagaactggcaagagggaaggcgagacagcagtgaacagctggtacgcagcacccacagcaccgcggcagcagctagtgccgactcccgcctagctcttttgactctgttcgcgggaagaatggggaaacagtaaggttgcggcgcctcccgcgagacgaggtacctgaggctggccccgcagtcccccgccgcaccagcaccggagcttcacaccccacttccggggtcaagtcaccgccgggaatcctgtgatcgcagaaaggtagtctcaggttccgcccctatccaagtcccgcctccactgcctctcgccctgtatctgtcaacttccgggacgccgcgcgtcactaagcagccaatctccacttccggactcatccagccccttctccacccctttcagagacagcgcgattgcgatttaggtttccgcgcatttaattggcgaagctggagcgctagtcttcgctgattggtgccgagaaatctgccccatagacacccgcggggcgcacagtttcagtcgtccgtgggtttcccgccagccgcagtcttggaccataatcatggtggacatgatggacttgcccaggtcgcgcatcaacgccggcatgctagctcaattcatcgacaagcctgtctgcttcgtagggaggctggaaaagattcatcccaccggaaaaatgtttattctttcagatggagaaggaaaaaatggaaccatcgagttgatggaaccccttgatgaagaaatctctggaattgtggaagtggttggaagagtaaccgccaaggccaccatcttgtgtacatcttatgtccagtttaaagaagatagccatccttttgatcttggactttacaatgaagctgtgaaaattatccatgacttccctcagttttatcctttagggattgtgcaacatgattgatcttgatggattttcatacgattgtaaatgagctatattaaagtctattaaaggaaaaaaaaaaaaaaaaaaaaa

SEQ ID NO: 65 - DNA, 2333 bp, Homo sapiens
agtaggacccaggggccgggaggcgccggcagagggaggggccgggggccggggaggttttgagggaggtctttggctttttttggcggagctggggcgccctccggaagcgtttccaactttccagaagtttctcgggacgggcaggagggggtggggactgccatatatagatcccgggagcaggggagcgggctaagagtagaatcgtgtcgcggctcgagagcgagagtcacgtcccggcgctagcccagcccgacccagaatgaaaaaggcaggcattgacctccctctgaggcagtttccaggcccaccgtggtgcacgcaaaccacttcctggccatgcgctccctcctgcttctcagcgccttctgcctcctggaggcggccctggccgccgaggtgaagaaacctgcagccgcagcagctcctggcactgcggagaagttgagccccaaggcggccacgcttgccgagcgcagcgccggcctggccttcagcttgtaccaggccatggccaaggaccaggcagtggagaacatcctggtgtcacccgtggtggtggcctcgtcgctagggctcgtgtcgctgggcggcaaggcgaccacggcgtcgcaggccaaggcagtgctgagcgccgagcagctgcgcgacgaggaggtgcacgccggcctgggcgagctgctgcgctcactcagcaactccacggcgcgcaacgtgacctggaagctgggcagccgactgtacggacccagctcagtgagcttcgctgatgacttcgtgcgcagcagcaagcagcactacaactgcgagcactccaagatcaacttccgcgacaagcgcagcgcgctgcagtccatcaacgagtgggccgcgcagaccaccgacggcaagctgcccgaggtcaccaaggacgtggagcgcacggacggcgccctgctagtcaacgccatgttcttcaagccacactgggatgagaaattccaccacaagatggtggacaaccgtggcttcatggtgactcggtcctataccgtgggtgtcatgatgatgcaccggacaggcctctacaactactacgacgacgagaaggaaaagctgcaaatcgtggagatgcccctggcccacaagctctccagcctcatcatcctcatgccccatcacgtggagcctctcgagcgccttgaaaagctgctaaccaaagagcagctgaagatctggatggggaagatgcagaagaaggctgttgccatctccttgcccaagggtgtggtggaggtgacccatgacctgcagaaacacctggctgggctgggcctgactgaggccattgacaagaacaaggccgacttgtcacgcatgtcaggcaagaaggacctgtacctggccagcgtgttccacgccaccgcctttgagttggacacagatggcaacccctttgaccaggacatctacgggcgcgaggagctgcgcagccccaagctgttctacgccgaccaccccttcatcttcctagtgcgggacacccaaagcggctccctgctattcattgggcgcctggtccggcctaagggtgacaagatgcgagacgagttatagggcctcagggtgcacacaggatggcaggaggcatccaaaggctcctgagacacatgggtgctattggggttgggggggaggtgaggtaccagccttggatactccatggggtgggggtggaaaaacagaccggggttcccgtgtgcctgagcggaccttcccagctagaattcactccacttggacatgggccccagataccatgatgctgagcccggaaactccacatcctgtgggacctgggccatagtcattctgcctgccctgaaagtcccagatcaagcctgcctcaatcagtattcatatttatagccaggtaccttctcacctgtgagaccaaattgagctaggggggtcagccagccctcttctgacactaaaacacctcagctgcctccccagctctatcccaacctctcccaactataaaactaggtgctgcagcccctgggaccaggcacccccagaatgacctggccgcagtgaggcggattgagaaggagctcccaggaggggcttctgggcagactctggtcaagaagcatcgtgtctggcgttgtggggatgaactttttgttttgtttcttccttttttagttcttcaaagatagggagggaagggggaacatgagcctttgttgctatcaatccaagaacttatttgtacattttttttttcaataaaacttttccaatgacattttgttggagcgtggaagaaaaaaaaaaaaaaa

SEQ ID NO: 66 - DNA, 509 bp, Homo sapiens
attctttccccaagtctctatggtagcgtcagcgtcggaggcggtagtgacggtggcgtttccttgaggaagagtgagggttccaacttttctgcttatctgggaggtgttgggcgcggacagtcgagatgtcagagaaaaagcagccggtagacttaggtctgttagaggaagacgacgagtttgaagagttccctgccgaagactgggctggcttagatgaagatgaagatgcacatgtctgggaggataattgggatgatgacaatgtagaggatgacttctctaatcagttacgagctgaactagagaaacatggttataagatggagacttcatagcatccagaagaagtgttgaagtaacctaaacttgacctgcttaatacattctagggcagagaacccaggatgggacactaaaaaaatgtgtttatttcattatctgcttggatttatttgtgtttttgtaacacaaaaaataaatgttttgatataaaaaaaaaaaaa

SEQ ID NO: 67 - DNA, 3604 bp, Homo sapiens
gcatctcctcctccctctccccgggctcctactggcctgaggttgagggcggctgggggctcggggcaggctccgcggcgttcccctccccaccccggccctccgttcagccgcgctcctccggggctgcggttcctactgcgcgagctgccagtggattcgctcttttcctccgtccgtggcccgcctgggcggccttgttctttccgcagcagccagataaccttctgttcggtgatgaaattatcactaatggttttcattcctgtgaaagtgatgaggaggatagagcctcacatgcaagctctagtgactggactccaaggccacggataggtgtctgtttcatgtggaatacctgacttcaggtcaagggatggtatttatgctcgccttgctgtagacttcccagatcttccagatcctcaagcgatgtttgatattgaatatttcagaaaagatccaagaccattcttcaagtttgcaaaggaaatatatcctggacaattccagccatctctctgtcacaaattcatagccttgtcagataaggaaggaaaactacttcgcaactatacccagaacatagacacgctggaacaggttgcgggaatccaaaggataattcagtgtcatggttcctttgcaacagcatcttgcctgatttgtaaatacaaagttgactgtgaagctgtacgaggagatatttttaatcaggtagttcctcgatgtcctaggtgcccagctgatgaaccgcttgctatcatgaaaccagagattgtgttttttggtgaaaatttaccagaacagtttcatagagccatgaagtatgacaaagatgaagttgacctcctcattgttattgggtcttccctcaaagtaagaccagtagcactaattccaagttccataccccatgaagtgcctcagatattaattaatagagaacctttgcctcatctgcattttgatgtagagcttcttggagactgtgatgtcataattaatgaattgtgtcataggttaggtggtgaatatgccaaactttgctgtaaccctgtaaagctttcagaaattactgaaaaacctccacgaacacaaaaagaattggcttatttgtcagagttgccacccacacctcttcatgtttcagaagactcaagttcaccagaaagaacttcaccaccagattcttcagtgattgtcacacttttagaccaagcagctaagagtaatgatgatttagatgtgtctgaatcaaaaggttgtatggaagaaaaaccacaggaagtacaaacttctaggaatgttgaaagtattgctgaacagatggaaaatccggatttgaagaatgttggttctagtactggggagaaaaatgaaagaacttcagtggctggaacagtgagaaaatgctggcctaatagagtggcaaaggagcagattagtaggcggcttgatggtaatcagtatctgtttttgccaccaaatcgttacattttccatggcgctgaggtatattcagactctgaagatgacgtcttatcctctagttcttgtggcagtaacagtgatagtgggacatgccagagtccaagtttagaagaacccatggaggatgaaagtgaaattgaagaattctacaatggcttagaagatgagcctgatgttccagagagagctggaggagctggatttgggactgatggagatgatcaagaggcaattaatgaagctatatctgtgaaacaggaagtaacagacatgaactatccatcaaacaaatcatagtgtaataattgtgcaggtacaggaattgttccaccagcattaggaactttagcatgtcaaaatgaatgtttacttgtgaactcgatagagcaaggaaaccagaaaggtgtaatatttataggttggtaaaatagattgtttttcatggataatttttaacttcattatttctgtacttgtacaaactcaacactaacttttttttttttaaaaaaaaaaaggtactaagtatcttcaatcagctgttggtcaagactaactttcttttaaaggttcatttgtatgataaattcatatgtgtatatataattttttttgttttgtctagtgagtttcaacatttttaaagttttcaaaaagccatcggaatgttaaattaatgtaaagggaacagctaatctagaccaaagaatggtattttcacttttctttgtaacattgaatggtttgaagtactcaaaatctgttacgctaaacttttgattctttaacacaattatttttaaacactggcattttccaaaactgtggcagctaactttttaaaatctcaaatgacatgcagtgtgagtagaaggaagtcaacaatatgtggggagagcactcggttgtctttacttttaaaagtaatacttggtgctaagaatttcaggattattgtatttacgttcaaatgaagatggcttttgtacttcctgtggacatgtagtaatgtctatattggctcataaaactaacctgaaaaacaaataaatgctttggaaatgtttcagttgctttagaaacattagtgcctgcctggatccccttagttttgaaatatttgccattgttgtttaaatacctatcactgtggtagagcttgcattgatcttttccacaagtattaaactgccaaaatgtgaatatgcaaagcctttctgaatctataataatggtacttctactggggagagtgtaatattttggactgctgttttccattaatgaggagagcaacaggcccctgattatacagttccaaagtaataagatgttaattgtaattcagccagaaagtacatgtctcccattgggaggatttggtgttaaataccaaactgctagccctagtattatggagatgaacatgatgatgtaacttgtaatagcagaatagttaatgaatgaaactagttcttataatttatctttatttaaaagcttagcctgccttaaaactagagatcaactttctcagctgcaaaagcttctagtctttcaagaagttcatactttatgaaattgcacagtaagcatttatttttcagaccatttttgaacatcactcctaaattaataaagtattcctctgttgctttagtatttattacaataaaaagggtttgaaatatagctgttctttatgcataaaacacccagctaggaccattactgccagagaaaaaaatcgtattgaatggccatttccctacttataagatgtctcaatctgaatttatttggctacactaaagaatgcagtatatttagttttccatttgcatgatgtttgtgtgctatagatgatattttaaattgaaaagtttgttttaaattatttttacagtgaagactgttttcagctctttttatattgtacatagtcttttatgtaatttactggcatatgttttgtagactgtttaatgactggatatcttccttcaacttttgaaatacaaaaccagtgttttttacttgtacactgttttaaagtctattaaaattgtcatttgacttttttctgttaacttaaaaaaaaaaaaaaaaa

SEQ ID NO: 68 - DNA, 1926 bp, Homo sapiens
agagtattcgggaggactacaactctctagccgttcccacattttccgggcgccctttaccaacatggctgctgacgccacgccttctgggactcgtagtccggtcctcgcgcgctttcttacctaactggggcgctctgggtgttgtacgaaagcgcgtctgcggccgcaatgtctgctgagagttgtagttctgtgccctatcacggccactcccatttctggtgccgtcacgggacagagcagtcggtgacaggacagagcagtcggtgacgggacacagtggttggtgacgggacagagcggtcggtgacagcctcaagggcttcagcaccgcgcccatggcagagccagaccgactcagattcagactctgagggaggagccgctggtggagaagcagacatggacttcctgcggaacttattctcccagacgctcagcctgggcagccagaaggagcgtctgctggacgagctgaccttggaaggggtggcccggtacatgcagagcgaacgctgtcgcagagtcatctgtttggtgggagctggaatctccacatccgcaggcatccccgactttcgctctccatccaccggcctctatgacaacctagagaagtaccatcttccctacccagaggccatctttgagatcagctatttcaagaaacatccggaacccttcttcgccctcgccaaggaactctatcctgggcagttcaagccaaccatctgtcactacttcatgcgcctgctgaaggacaaggggctactcctgcgctgctacacgcagaacatagataccctggagcgaatagccgggctggaacaggaggacttggtggaggcgcacggcaccttctacacatcacactgcgtcagcgccagctgccggcacgaatacccgctaagctggatgaaagagaagatcttctctgaggtgacgcccaagtgtgaagactgtcagagcctggtgaagcctgatatcgtcttttttggtgagagcctcccagcgcgtttcttctcctgtatgcagtcagacttcctgaaggtggacctcctcctggtcatgggtacctccttgcagggacgtggcctggctgggtgaatgcgaccagggctgcctggcccttgctgagctccttggatggaagaaggagctggaggaccttgtccggagggagcacgccagcatagatgcccagtcgggggcgggggtccccaaccccagcacttcagcttcccccaagaagtccccgccacctgccaaggacgaggccaggacaacagagagggagaaaccccagtgacagctgcatctcccaggcgggatgccgagctcctcagggacagctgagccccaaccgggcctggccccctcttaaccagcagttcttgtctggggagctcagaacatcccccaatctcttacagctccctccccaaaactggggtcccagcaaccctggcccccaaccccagcaaatctctaacacctcctagaggccaaggcttaaacaggcatctctaccagccccactgtctctaaccactcctgggctaaggagtaacctccctcatctctaactgcccccacggggccagggctaccccagaacttttaactcttccaggacagggagcttcgggcccccactctgtctcctgcccccgggggcctgtggctaagtaaaccatacctaacctaccccagtgtgggtgtgggcctctgaatataacccacacccagcgtagggggagtctgagccgggagggctcccgagtctctgccttcagctcccaaagtgggtggtgggcccccttcacgtgggacccacttcccatgctggatgggcagaagacattgcttattggagacaaattaaaaacaaaaacaactaacaatccggaaaaaaaaaaaaaa

SEQ ID NO: 69 - DNA, 3273 bp, Homo sapiens
aattcccagcaggccttgggcctcagtgcggccgcgaagcagagcgggctgtagagccttgcgcgcgcagtggggatggaacgttgctaggcttagcgggtctggctgctgggggcccgagcagcacgctcggagccgccgcgcgccaaagcgggaatctgggaggcgagcagctctgcagttaatgcacgtattttaaactcccgggcctgcggacgctatgcacaggaagcacctccaggagattccagacctgagtagcaacgttgccaccagcttcacgtggggatgggattccagcaagacttctgaactgctgtcaggcatgggggtctccgccctggagaaagaggagcccgacagtgagaacatcccccaggaactgctctcaaacctgggccacccggagagccccccacggaaacggctgaagagcaaagggagtgacaaagactttgtgattgtccgcaggcctaagctaaatcgagagaactttccaggtctgatgagtctctatggcagaccttagacctcacaggtaaaaatctgcacccggatgtgactggtcggttgctgtctcaaggggtgattgccttccgctgcccacgatcatttatggaccaaccattggctgaacatttcagtactctcgcaaaaaactcaaatttagtgcgacttaacctttctgggtgttctggattctctgaatttgccctgcagactttgctaagcagctgttccagactggatgagctgaacctctcctggtgttttgatttcactgaaaagcatgtacaggtggctgttgcgcatgtgtcagagaccatcacccagctgaatcttagcggctacagaaagaatctccagaaatcagatctctctactttagttagaagatgccccaatcttgtccatctagacttaagtgatagtgtcatgctaaagaatgactgctttcaggaatttttccagctcaactacctccaacacctatcactcagtcggtgctatgatataatacctgaaactttacttgaacttggagaaattcccacactaaaaacactacaagtttttggaatcgtgccagatggtacccttcaactgttaaaggaagcccttcctcatctacagattaattgctcccatttcaccaccattgccaggccaactattggcaacaaaaagaaccaggagatatggggcatcaaatgccgactgacactgcaaaagcccagttgtctatgaagtatttattgcaggatggtgtctcttctttagaacagggaaaataggcaggaagcccaattgctggagtacttagctagttttattcttggttttccctttgccttcattctgcaagtatactagggagccatttgagagggaaaactatgaaatcttgctttttgaaatgattctaaaagcttctatcactgctttgctcttaagagccaaagttgtaggccttttgaaattttaggagagtgagcctataatttcaagataccttaaagagcaaaatttgagccacctcttccaagtgcccttcttactaagtctattcagaatcaagcttaaaaattaccaccagcaaacaatcttcatagcccatataacttttatctatttaattttatagtattgctttataagacagcttagaagaacaataagctatttgtattatgagctgaacaaaaagagaatcataggatagtagcgtctgaggccatcttttctaggaataggaaagagaaaaatgtatttgaattttgcctttagatttgaaattaggttaatagaaataagtaaccccatgtaattcaccttaaaacttaacaaaagaccaaacattacaaaacccagagatatagaatcaatataggatttgaaggcccagcagacagttttctatgacaggttaatctgaagtatcctgtaatgttcattaagttactgtgtttccagaatctaaattagatgagaaatataattgtggttttctaacttgataatcaaattatgttaacatgggtcctttagcttttaaaatgacttgctttgttttagaaaggtggtattaatccactctctattcttgaaaatttggatgggagaattctgaagttgcctgctgttttcctttagcgctgaggttcttaaggttacttttatattactctggaatcaagtattttaaattgtattttttttttaaatgatctctcagcaataattgtttgaaactatccatatataaggttatcagacctacagttccctaagaggaactgcatgttctcttcaatcagaaatatacagtagaagcaggtatatcttccatgcagtttcagtagtaagcactacttatacctacataagagttaaaatccagatgtgggaccttttgataccatcagtgatatatatttttttaaactggtacagagaagtgaaaagattaaattctacttctattttttttttttttttttgagacggagtctcgctctgtcaccaaggccggagtgcagtggtgcgatctcggctcactgcaagctccgcctcccaggttcacgtcattctcctgcctcagcctcccgactagctgggactacaggcgcccaccaccacgcccggctaatttttttgtatttttagtagagacggggtttcaccatgttagccaggatggtctcaatctcctgacctcatgatccgcccgtcttggcctcccaaagtgctgggattacaggcatgagcaactgcgcccagccaaattctacttcttaaaaatcacaaaaactagtttaaattgatgacttgttcgtatgttcaaaatgtaacaacaaaaaaagctaacaccagtcatttatattaactttttttttttaaatcaaaaattgttaatgttagaaacatactatgaagtgcctttatctgcttagacctaaggaagattttaaagttgggttgcacaggaaatgatgatgcttcaatttcttaatagttaaaaagtgctaaatactacttgaaattattgtttacagattagtgacaagagctggggttaggatccggttggactctgacatcggatgccctcaaacatacagaacttccaaactcaagtccagccataagctattttgccaacatgtcagagtaatctgtatttttgtatgtgatttctacttttatagacttgttttaaaacaataaaacacatttttataaaaatgagtgcttaaaaaaaaaaaaaaaaaa

SEQ ID NO: 70 - DNA, 2880 bp, Homo sapiens
cactgcatgtgtattcgtgagttcgcggttgaacaactgttcctttactctgctccctgtctttgtgctgactgggttacttttttaaacactaggaatggtaatttctactcttctggacttcaaactaagaagttaaagagacttctctgtaaataaacaaatctcttctgctgtccttttgcatttggagacagctttatttcaccatatccaaggagtataactagtgctgtcattatgaatgtgacaagtttattttcctttacaagtccagctgtgaagagacttcttgggtggaaacagggcgatgaagaagaaaaatgggcagagaaagctgttgatgctttggtgaaaaaactgaagaaaaagaaaggtgccatggaggaactggaaaaggccttgagctgcccagggcaaccgagtaactgtgtcaccattccccgctctctggatggcaggctgcaagtctcccaccggaagggactgcctcatgtcatttactgccgtgtgtggcgctggcccgatcttcagagccaccatgaactaaaaccactggaatgctgtgagtttccttttggttccaagcagaaggaggtctgcatcaatccctaccactataagagagtagaaagccctgtacttcctcctgtgctggttccaagacacagcgaatataatcctcagcacagcctcttagctcagttccgtaacttaggacaaaatgagcctcacatgccactcaacgccacttttccagattctttccagcaacccaacagccacccgtttcctcactctcccaatagcagttacccaaactctcctgggagcagcagcagcacctaccctcactctcccaccagctcagacccaggaagccctttccagatgccagctgatacgcccccacctgcttacctgcctcctgaagaccccatgacccaggatggctctcagccgatggacacaaacatgatggcgcctcccctgccctcagaaatcaacagaggagatgttcaggcggttgcttatgaggaaccaaaacactggtgctctattgtctactatgagctcaacaatcgtgtgggtgaagcgttccatgcctcctccacaagtgtgttggtggatggtttcactgatccttccaacaataagaaccgtttctgccttgggctgctctccaatgttaaccggaattccactattgaaaacaccaggcggcatattggaaaaggagttcatctttattatgttggaggggaggtgtatgccgaatgccttagtgacagtagcatctttgtgcaaagtcggaactgcaactaccatcatggatttcatcctactactgtttgcaagatccctagtgggtgtagtctgaaaatttttaacaaccaagaatttgctcagttattggcacagtctgtgaaccatggatttgagacagtctatgagcttacaaaaatgtgtactatacgtatgagctttgtgaagggctggggagcagaataccaccgccaggatgttactagcaccccctgctggattgagatacatctgcacggccccctccagtggctggataaagttcttactcaaatgggttcacctcataatcctatttcatctgtatcttaaatggccccaggcatctgcctctggaaaactattgagccttgcatgtacttgaaggatggatgagtcagacacgattgagaactgacaaaggagccttgataatacttgacctctgtgaccaactgttggattcagaaatttaaacaaaaaaaaaaaaaaacacacacaccttggtaacatactgttgatatcaagaacctgtttagtttacattgtaacattctattgtaaaatcaactaaaattcagacttttagcaggactttgtgtacagttaaaggagagatggccaagccagggacaaattgtctattagaaaacggtcctaagagattctttggtgtttggcactttaaggtcatcgttgggcagaagtttagcattaatagttgttctgaaacgtgttttatcaggtttagagcccatgttgagtcttcttttcatgggttttcataatattttaaaactatttgtttagcgatggttttgttcgtttaagtaaaggttaatcttgatgatatacataataatctttctaaaattgtatgctgaccatacttgctgtcagaataatgctaggcatatgctttttgctaaatatgtatgtacagagtatttggaagttaagaattgattagactagtgaatttaggagtatttgaggtgggtggggggaagagggaaatgacaactgcaaatgtagactatactgtaaaaattcagtttgttgctttaaagaaacaaactgatacctgaattttgctgtgtttccattttttagagatttttatcatttttttctctctcggcattcttttttctcatactcttcaaaaagcagttctgcagctggttaattcatgtaactgtgagagcaaatgaataattcctgctattctgaaattgcctacatgtttcaataccagttatatggagtgcttgaatttaataagcagtttttacggagtttacagtacagaaataggctttaattttcaagtgaattttttgccaaacttagtaactctgttaaatatttggaggatttaaagaacatcccagtttgaattcatttcaaactttttaaatttttttgtactatgtttggttttattttccttctgttaatcttttgtattcacttatgctctcgtacattgagtacttttattccaaaactagtgggttttctctactggaaattttcaataaacctgtcattattgcttactttgattaaaaa

SEQ ID NO: 71 - DNA, 10551 bp, Homo sapiens
cggccgggaggcggggcgggccgtaggcaaagggaggtggggaggcggtggccggcgactccccgcgccccgctcgccccccggcccttcccgcggtgctcggcctcgttcctttcctcctccgctccctccgtcttccatacccgccccgcgcggctttcggccggcgtgcctcgcgccctaacgggcggctggaggcgccaatcagcgggcggcagggtgccagccccggggctgcgccggcgaatcggcggggcccgcggcccagggtggcaggcgggtctacccgcgcggccgcggcggcggagaagcagctcgccagccagcagcccgccagccgccgggaggttcgatacaagaggctgttttcctagcgtggcttgctgcctttggtaagaacatgtcgtccatcttgccattcacgccgccagttgtgaagagactgctgggatggaagaagtcagctggtgggtctggaggagcaggcggaggagagcagaatgggcaggaagaaaagtggtgtgagaaagcagtgaaaagtctggtgaagaagctaaagaaaacaggacgattagatgagcttgagaaagccatcaccactcaaaactgtaatactaaatgtgttaccataccaagcacttgctctgaaatttggggactgagtacaccaaatacgatagatcagtgggatacaacaggcctttacagcttctctgaacaaaccaggtctcttgatggtcgtctccaggtatcccatcgaaaaggattgccacatgttatatattgccgattatggcgctggcctgatcttcacagtcatcatgaactcaaggcaattgaaaactgcgaatatgcttttaatcttaaaaaggatgaagtatgtgtaaacccttaccactatcagagagttgagacaccagttttgcctccagtattagtgccccgacacaccgagatcctaacagaacttccgcctctggatgactatactcactccattccagaaaacactaacttcccagcaggaattgagccacagagtaattatattccagaaacgccacctcctggatatatcagtgaagatggagaaacaagtgaccaacagttgaatcaaagtatggacacaggctctccagcagaactatctcctactactctttcccctgttaatcatagcttggatttacagccagttacttactcagaacctgcattttggtgttcgatagcatattatgaattaaatcagagggttggagaaaccttccatgcatcacagccctcactcactgtagatggctttacagacccatcaaattcagagaggttctgcttaggtttactctccaatgttaaccgaaatgccacggtagaaatgacaagaaggcatataggaagaggagtgcgcttatactacataggtggggaagtttttgctgagtgcctaagtgatagtgcaatctttgtgcagagccccaattgtaatcagagatatggctggcaccctgcaacagtgtgtaaaattccaccaggctgtaatctgaagatcttcaacaaccaggaatttgctgctcttctggctcagtctgttaatcagggttttgaagccgtctatcagctaactagaatgtgcaccataagaatgagttttgtgaaagggtggggagcagaataccgaaggcagacggtaacaagtactccttgctggattgaacttcatctgaatggacctctacagtggttggacaaagtattaactcagatgggatccccttcagtgcgttgctcaagcatgtcataaagcttcaccaatcaagtcccatgaaaagacttaatgtaacaactcttctgtcatagcattgtgtgtggtccctatggactgtttactatccaaaagttcaagagagaaaacagcacttgaggtctcatcaattaaagcaccttgtggaatctgtttcctatatttgaatattagatgggaaaattagtgtctagaaatactctcccattaaagaggaagagaagattttaaagacttaatgatgtcttattgggcataaaactgagtgtcccaaaggtttattaataacagtagtagttatgtgtacaggtaatgtatcatgatccagtatcacagtattgtgctgtttatatacatttttagtttgcatagatgaggtgtgtgtgtgcgctgcttcttgatctaggcaaacctttataaagttgcagtacctaatctgttattcccacttctctgttatttttgtgtgtcttttttaatatataatatatatcaagattttcaaattatttagaagcagattttcctgtagaaaaactaatttttctgccttttaccaaaaataaactcttgggggaagaaaagtggattaacttttgaaatccttgaccttaatgtgttcagtggggcttaaacagtcattctttttgtggttttttgtttttttttgtttttttttttaactgctaaatcttattataaggaaaccatactgaaaacctttccaagcctcttttttccattcccatttttgtcctcataatcaaaacagcataacatgacatcatcaccagtaatagttgcattgatactgctggcaccagttaattctgggatacagtaagaattcatatggagaaagtccctttgtcttatgcccaaatttcaacaggaataattggcttgtataatctagcagtctgttgatttatccttccacctcataaaaaatgcataggtggcagtataattattttcagggatatgctagaattacttccacatatttatccctttttaaaaaagctaatctataaataccgtttttccaaaggtattttacaatatttcaacagcagaccttctgctcttcgagtagtttgatttggtttagtaaccagattgcattatgaaatgggccttttgtaaatgtaattgtttctgcaaaatacctagaaaagtgatgctgaggtaggatcagcagatatgggccatctgtttttaaagtatgttgtattcagtttataaattgattgttattctacacataattatgaattcagaattttaaaaattgggggaaaagccatttatttagcaagttttttagcttataagttacctgcagtctgagctgttcttaactgatcctggttttgtgattgacaatatttcatgctctgtagtgagaggagatttccgaaactctgttgctagttcattctgcagcaaataattattatgtctgatgttgactcattgcagtttaaacatttcttcttgtttgcatcttagtagaaatggaaaataaccactcctggtcgtcttttcataaattttcatatttttgaagctgtctttggtacttgttctttgaaatcatatccacctgtctctataggtatcattttcaatactttcaacatttggtggttttctattgggtactccccattttcctatatttgtgtgtatatgtatgtgttcatgtaaatttggtatagtaattttttattcattcaacaaatatttattgttcacctgtttgtaccaggaacttttcttagtctttgggtaaaggtgaacaagacaactacagttcctgcctttgctgagacagcagttacactaacccttaattatcttacttgtctatgaaggagataaacagggtactgtactggagaataacagatgggatgcttcaggtaggacatcaaggaaagcctctaaggaaaggatgcatgagctaacacctgacattaaagaagcaagccaagtgaggagccaggggagataagcattcctggcaaagagaatagcatcaaatgcaaaaaggttcacactaaaggaaactcctgattaggtattaatgctttatacagaaacctctatacaaatccaaacttgaagatcagaatggttctacagttcataacattttgaaggtggccttattttgtgatagtctgcttcatgtgattctcactaacatatctccttcctcaacctttgctgtaaaaatttcatttgcaccacatcagtactacttaatttaacaagcttttgttgtgtaagctctcactgttttagtgccctgctgcttgcttccagactttgtgctgtccagtaattatgtcttccactacccatcttgtgagcagagtaaatgtcctaggtaataccactatcaggcctgtaggagatactcagtggagcctctgcccttctttttcttacttgagaacttgtaatggtgttagggaacagttgtaggggcagaaaacaactctgaaagtggtagaaggtcctgatcttggtggttactcttgcattactgtgttaggtcaagcagtgcctactatgctgtttcagtagtggagcgcatctctacagttctgatgcgatttttctgtacagtatgaaattgggactcaactctttgaaaacacctattgagcagttatacctgttgagcagtttacttcctggttgtaattacatttgtgtgaatgtgtttgatgctttttaacgagatgatgttttttgtattttatctactgtggcctgattttttttttgttttctgcccctccccccatttataggtgtggttttcatttttctaagtgatagaatcccctctttgttgaatttttgtctttatttaaattagcaacattacttaggatttattcttcacaatactgttaattttctaggaatgatgacctgagaaccgaatggccatgctttctatcacatttctaagatgagtaatattttttccagtaggttccacagagacaccttgggggctggcttaggggaggctgttggagttctcactgacttagtggcatatttattctgtactgaagaactgcatggggtttcttttggaaagagtttcattgctttaaaaagaagctcagaaagtctttataaccactggtcaacgattagaaaaatataactggatttaggcctaccttctggaataccgctgattgtgctctttttatcctactttaaagaagctttcatgattagatttgagctatatcagttataccgattataccttataatacacattcagttagtaaacatttattgatgcctgttgtttgcccagccactgtgatggatattgaataataaaaagatgactaggacggggccctgacccttgagctgtgcttggtcttgtagaggttgtgttttttttcctcaggacctgtcactttggcagaaggaaatctgcctaatttttcttgaaagctaaattttctttgtaagtttttacaaattgtttaatacctagttgtattttttaccttaagccacattgagttttgcttgatttgtctgtcttttaaacactgtcaaatgctttcccttttgttaaaattattttaatttcactttttttgtgcccttgtcaatttaagactaagactttgaaggtaaaacaaacaaacaaacatcagtcttagtctcttgctagttgaaatcaaataaaagaaaatatatacccagttggtttctctacctcttaaaagcttcccatatatacctttaagatccttctcttttttctttaactactaaataggttcagcatttattcagtgttagataccctcttcgtctgagggtggcgtaggtttatgttgggatataaagtaacacaagacaatcttcactgtacataaaatatgtcttcatgtacagtctttactttaaaagctgaacattccaatttgcgccttccctcccaagcccctgcccaccaagtatctctttagatatctagtctgtggacatgaacaatgaatacttttttcttactctgatcgaaggcattgatacttagacatatcaaacatttcttcctttcatatgctttactttgctaaatctattatattcattgcctgaattttattcttcctttctacctgacaacacacatccaggtggtacttgctggttatcctctttcttgttagccttgttttttgttttttttttttttttttgagagggagtctcgctctgttgcccaacctggagtgcagtggtgcgatcttggttcactgcaagctccgcctcccgggttcacgccatgcttctgcctcagcctcccaagtagctgggactacaggcgcccaccaccacactcggctaattttttgtatttttagtagagacggggtttcaccgtgttggccaggatggtctcgatctcctgacctcgtgatctgtccacctcggcttcccaaagtgctgggattacaggcatgagccaccgcgcccagcctagccatatttttatctgcatatatcagaatgtttctctcctttgaacttattaacaaaaaaggaacatgcttttcatacctagagtcctaatttcttcatcatgaaggttgctattcaaattgatcaatcattttaattttacaaatggctcaaaaattctgttcagtaaatgtctttgtgactggcaaatggcataaattatgtttaagattatgaacttttctgacagttgcagccaatgttttccctacgataccagatttccatcttggggcatattggattgttgtatttaagacagtcagaataatgatagtgtgtggtctccagaggtagtcagaatcctgctattgagttctttttatatcttccttttcaattttttattaccattttgtttgtttagactacactttgtagggattgaggggcaaattatctcttggagtggaattcctgtgttttgagccttacaaccaggaaatatgagctatactagatagcctcatgatagcatttacgataagaacttatctcgtgtgttcatgtaattttttgagtaggaactgttttatcttgaatattgtagctaactatatatagcagaactgcctcagtctttttaagaaggaaataaataatatatgtgtatgaatttatatatacatatacactcatagacaaacttaacagttggggtcattctaacagttaaaacaattgttccattgtttaaatctcagatcctggtaaaatgttcttaatttgtctgtgtacattttcctttcatggacagaccattggagtacattaattttcttaatctgccatttggcagttcatttaatataccattttttggcaacttggtaactaagaatcacagccaaaatttgttaacatcaaagaaagctctgccatataccccgttactaaattattatacatccagcagattctgggatgtactaacttagggttaactttgttgttgttgataatactagattgctccctctttaattcttcttctggtgcaaggttgctgcttaagttaccctgggaaatactactacaaggtcaaattttctagtatcttacagcctgattgaaggtgattcagatctttgctcaatataaatggattttccaagattctctgggccatccttgacccacaggtgatctcgctggagtatattaacttaacttcagtgccagttggtttggtgccatgagatccataatgaatccagaacttcaccattgcttagatataagagtcccttggaagaataatgccactgatgatgggggtcagaaggtgtattaactcaacatagagggcttttagatttttcttcaaaaaaatttcgagaaaagtattcttttaccctccaaacagttaacagctcttagtttctccaaatatgctctttgatttacttatttttaattaaagatggtaatttattgaacaatgaaatccgtaatatattgatttaaggacaaaagtgaagttttagaattataaaagtacttaaatattatatattttccatttcataattgttttcctttctctgtggctttaaagtttttgactattttacaatgttaatcactaggtaacttgccatatttctggttctatattaagttctatcctttataatgctgttattataaagctggtttttagcatttgtctgtagcaatagaaattttactaagtctctgttctcccagtaagttttttcttttctcagtaagtccctaagaaaacatttgtttgccactcttactattcccaatcttggattgttcgagctgaaaaaaaatttgatgagaaacaggaggatccttttctggtgaatataggttcctgctttaagaatgtggaaatccattgctttatataactaatatacacacagattaattaaaattgtgagaaataattcacacatgacaagtaggtaacatgcatgagttttgaatttttttaaaaacccaactgtttgacaaaatatagaacccaaattggtactttcttagaccagtgtaacctcacacctcagttttgcttttccaaccctgacttgaaaggcatatttgtatctttttattagtgatagtgaagctgtgacactaaccttttatacaaaagagtaaagaaagaaaaactacagcgattaagatgagaacagttctgcagttgttgaactagatcacagcattgtaggcagaataaaaaatgttcatatctgagaatattcctttcgccatcttttcccaaggccagacctcctggtggagcacagttaaaagtaacattctgggcctttgtaatcggagggctgtgtctccagctggcagcctttgttttaatatataatgcaggactgtggaaaacagttggcatagaatattttcacctaaaaaagaaagaaaagacatacaaaactggattaattgcaaaaagagaatacagtaaaataccatataactggacaaagctagaagaacctttagaagatttgtctgaaaacagatttcaagagtgagcttttatacactgctcactaatttgcttgattactaccaactcttcttaaagttaacacgtttaaggtatttctggacttcctagccttttagcaagcttagaggaactagccattagctagtgatgtaaaaatattttggggactgatgcccttaaaggttatgcccttgaaagttcttaccttttctctagtgatattaaggaacgagtgggtagtgttctcagggtgaccagctgccctaaagtgcctgggattgagggtttccctggatgcgggactttccctggatacaaaacttttagcagagttttgtatatatgtggatttttctgataagtagcacatcagaggccttaaccactgcccaaaagcgattctccattgagagtacatatcttgaacttaagaaattcatttgctctgatttttaatcttgtaaagtttttgctaaactcaaaacaagtcccaggcacaccagaaggagctgaccaccttaggtgttcttgtgatttatccttacttccctatgttgtcatagttgcttctaaactcagctgcactatggctgtcaacatttctgatacttattgggatatgtgccatccagtcatttagtactttgaatggaacatgagatttataacacaggtaatagctgaaggtaccagtatggtggtgagactcacacttagtgatccagctaaggtaactgatgttataatggaacagagaagaggccaactagatagctaagttcttctgaacctatgtgtatatgtaagtacaaatcatgcgtccttatggggttaaacttaatctgaaatttacatttttcatagtaaaaggaaaccaattgttgcagatttcttttcttgtgaggaaatacatggcctttgatgctctggcgtctactgcatttcccagtctgttctgctcgagaagccagaatgtgttgttaacatttttccgtgaatgttgtgttaaaatgattaaatgcatcagccaatggcaagtgaaggaattgggtgtcctgatgcagactgagcagtttctctcaattgtagcctcatactcataaggtgcttaccagctagaacattgagcacgtgaggtgagattttttttctctgatggcattaactttgtaatgcaatatgatggatgcagaccctgttcttgtttccctctggaagtccttagtggctgcatccttggtgcactgtgatggagatattaaatgtgttctttgtgagctttcgttctatgattgtcaaaagtacgatgtggttccttttttatttttattaaacaatgagctgaggctttattacagctggttttcaagttaaaattgttgaatactgatgtctttctcccacctacaccaaatattttagtctatttaaagtacaaaaaaagttctgcttaagaaaacattgcttacatgtcctgtgatttctggtcaatttttatatatatttgtgtgcatcatctgtatgtgctttcactttttaccttgtttgctcttacctgtgttaacagccctgtcaccgttgaaaggtggacagttttcctagcattaaaagaaagccatttgagttgtttaccatgttaaaaaaaaaaaaaaaa

SEQ ID NO: 72 - DNA, 5997 bp, Homo sapiens
aaatatgagcttgtgcttgctggaggaggatgacagaggagcctgctgctgagttcactggtgctggggttaggtcactgctgggctgaagcgcactgaccataagagcaacatgtgggcaagagccgcggcactggggtaatttattgccgccgctcgcttcaccaggaaccccacacgctgggttcccacaggatgcgacattcccacaggatgggacaactgcatggaaacccacactcgggcctgtgttgagcaaccacgtttgagtccctggatggccggttgcaggtgtcccatcggaaggggctccctcatgtcatctactgccgcctgtggcgatggccagacctgcacagccaccacgagctacgggccatggagctgtgtgagttcgccttcaatatgaagaaggacgaggtctgcgtgaatccctaccactaccagagagtagagacaccagttctacctcctgtgttggtgccacgccacacagagatcccggccgagttccccccactggacgactacagccattccatccccgaaaacactaacttccccgcaggcatcgagccccagagcaatattccagagaccccaccccctggctacctgagtgaagatggagaaaccagtgaccaccagatgaaccacagcatggacgcaggttctccaaacctatccccgaatccgatgtccccagcacataataacttggacctgcagccagttacctactgcgagccggccttctggtgctccatctcctactacgagctgaaccagcgcgtcggggagacattccacgcctcgcagccatccatgactgtggatggcttcaccgacccctccaattcggagcgcttctgcctagggctgctctccaatgtcaacaggaatgcagcagtggagctgacacggagacacatcggaagaggcgtgcggctctactacatcggaggggaggtcttcgcagagtgcctcagtgacagcgctatttttgtccagtctcccaactgtaaccagcgctatggctggcacccggccaccgtctgcaagatcccaccaggatgcaacctgaagatcttcaacaaccaggagttcgctgccctcctggcccagtcggtcaaccagggctttgaggctgtctaccagttgacccgaatgtgcaccatccgcatgagcttcgtcaaaggctggggagcggagtacaggagacagactgtgaccagtaccccctgctggattgagctgcacctgaatgggcctttgcagtggcttgacaaggtcctcacccagatgggctccccaagcatccgctgttccagtgtgtcttagagacatcaagtatggtaggggagggcaggcttggggaaaatggccatgcaggaggtggagaaaattggaactctactcaacccattgttgtcaaggaagaagaaatctttctccctcaactgaaggggtgcacccacctgttttctgaaacacacgagcaaacccagaggtggatgttatgaacagctgtgtctgccaaacacatttaccctttggccccactttgaagggcaagaaatggcgtctgctctggtggcttaagtgagcagaacaggtagtattacaccaccggccccctccccccagactctttttttgagtgacagctttctgggatgtcacagtccaaccagaaacacccctctgtctaggactgcagtgtggagttcaccttggaagggcgttctaggtaggaagagcccgcagggccatgcagacctcatgcccagctctctgacgcttgtgacagtgcctcttccagtgaacattcccagcccagccccgccccgccccgccccaccactccagcagaccttgccccttgtgagctggatagacttgggatggggagggagggagttttgtctgtctccctcccctctcagaacatactgattgggaggtgcgtgttcagcagaacctgcacacaggacagcgggaaaaatcgatgagcgccacctctttaaaaactcacttacgtttgtcctttttcactttgaaaagttggaaggatctgctgaggcccagtgcatatgcaatgtatagtgtctattatcacattaatctcaaagagattcgaatgacggtaagtgttctcatgaagcaggaggcccttgtcgtgggatggcatttggtctcaggcagcaccacactgggtgcgtctccagtcatctgtaagagcttgctccagattctgatgcatacggctatattggtttatgtagtcagttgcattcattaaatcaactttatcatatgctcttttaaatgtttggtttatatattttctttaaaaatcctgggctggcacattgactgggaaacctgagtgagacccagcaactgcttctctcccttctctctcctgaggtgaagcttttccaggttttgttgaagagatacctgccagcacttctgcaagctgaaatttacagaagcaaattcaccagaagggaaacatctcaggccaacataggcaaatgaaaagggctattaaaatatttttacacctttgaaaattgcaggcttggtacaaagaggtctgtcatcttccccctgggatataagatgatctagctcccggtagaggatcaccggtgacaactatagcagttgtattgtgtaacaagtactgctcccagcagcaattagggagaaaactagtctaaattatttcaactggaaaaaagaaaaaagagtcctcttcttttcccagccttttgcagaacacagtagacagaactgccaccttcaattggtactttattctttgctgctgtttttgtataaaatgacctatcccacgtttttgcatgaatttatagcaggaaaaatcaagggatttcctatggaagtcctgctttattccaggtgaagggaaggaagtgtatatacttttggcaagtcatacagctcaaatgtgatgagatttctgatgttagagggagatggagaggcttcctgatgcctcatctgcagggtcctgtgcctctgaagttctagccatgaggtttccaggtaggacagctgctccccaagcctcctgaggacacaggaagagacggaaggagcaccttgacagacttgtgtgagtcttctcgaaggagggttgactcagaacccagagacaatacaaaacccctcacttcctctgagagggccaaatgctgtgagtctgaagtatgtgcctggtgtgaaatgatctatggcctgtttcttacacaggaagccccctgaacctcctgtacatgtgttcatgttcccagccagctctgagacccaggaaccaaatattccattttggcttctgctagagcagtcatggttcctctcctaaaagccatgggcagcagtttccgagggcctgcatgatccacctgctgcacgatcctatgagggcttcctgtggcacacagccctctgggtgcttgggaactagcttcaggcacagcctgattctggtgatccagtgatctatggaagtcgtgtcttactccaggtgaagggggaaaaaaaaagcctatactttggcaggttatgaactttgaatgtgatgaaatgacacgtttggctgcatttggatggtgtcttagaaccctcattgctcagacctgaaggctacttctaggagcatgaagtttgagttttgtgtttttccaaaggatacttccttggccctttttctttattgactagaccaccagaggaggatgtgtgggattgtaggcaaacccacctgtggcatcactgaaaataaatttgatcatacctaagaggttaggaaatggtgccattcccaccttagagtgctacataggtgctttgggcgtatgtaacattagtgtccttccttgaagccacaagctagttttcttagttttaaaatcctgttgtatgaatggcatttgtatattaaaacacttttttaaaggacagttgaaaagggcaagaggaaaccagggcagttctagaggagtgctggtgactggatagcagttttaagtggcgttcacctagtcaacacgaccgcgtgtgttgcccctgccctgggctccccgccatgacatcttcaccttgcagcttgtgctgagactgacccaagtgcagctagcactgggacacagatccttgtcttcagcaccttccaaggagccaacttttattccctttcctctctcccctccccacctcgcttcttcccaatttagtaacttagatgcttccagcacatacgtaggtagctaccccagccggtttggattacaggcctgtgctggaacatcatctcagttggccaccttcctggcaggctgtagacctgacattttgagacaagcctagagtcaggagcagggactttgactcttaggaagagcacacatgagggcaaggctgctggcagacgtctccattgtccttatgttgtctgtgttgtatttttttttttttattgaccatggtgattatttttttaaaccatcgttaatatactgaagtgagctatagcacatatcatgtgcttagtttgtttatttttctccatctccccttggcttcctagagtttggacatattccaggctaaatgcttttactcaagactacagaaaggtttgaagtagtgtgtgcatggcatgcacgtatgtaagtaatctggggaagaagcaaagatctgtttcattcttagcctcaggcctcatgagggtctccacagggccggagctcaggttacaccactccttcgtccttacaggagatgtagggagaagaatctgcaggctgcttgtaggactgttcaccaagggggataccagcagcaagagagtgcacccgtttagccctggaccctgtttcttactgtgtgacttggctagagttgggagttcccccaaaataaacgtgtccccattttaccagaaccaaacctcaacacagcgaagctgtactgtctttgtgtggcaaagatgttcccttgtaggcccctttcaggtaaccgtcttcacaatgtattttcatcacagtttaaggagcatcagccgcttctcaagtgggtagggaaagcagaaaaacgtacgcaagaggacatggatccaaaatgatgatgaagcatctcccatggggaggtgatggtggggagatgatgggctaaacaggcaacttttcaaaaacacagctatcatagaaaagaaacttgcctcatgtaaactggattgagaaattctcagtgattctgcaatggatttttttttaatgcagaagtaatgtatactctagtattctggtgtttttatatttatgtaataatttcttaaaaccattcagacagataactatttaattttttttaagaaagttggaaaggtctctcctcccaaggacagtggctggaagagttggggcacagccagttctgaatgttggtggagggtgtagtggctttttggctcagcatccagaaacaccaaaccaggctggctaaacaagtggccgcgtgtaaaaacagacagctctgagtcaaatctgggcccttccacaagggtcctctgaaccaagccccactcccttgctaggggtgaaagcattacagagagatggagccatctatccaagaagccttcactcaccttcactgctgctgttgcaactcggctgttctggactctgatgtgtgtggagggatggggaatagaacattgactgtgttgattaccttcactattcggccagcctgaccttttaataactttgtaaaaagcatgtatgtatttatagtgttttagatttttctaacttttatatcttaaaagcagagcacctgtttaagcattgtacccctattgttaaagatttgtgtcctctcattccctctcttcctcttgtaagtgcccttctaataaacttttcatggaaaagctcctgtgccaggagctcagtctga

SEQ ID NO: 73 - DNA, 4131 bp, Homo sapiens
ttttgtttggctgaggggagcgagcggcgctttgggggaggggtcgcgtaggcgcctcacctgaccctgcggccgtgcggttgctgctccggggcaggtctccttccaggccaggggcccggaatcatgtacataaagcaggtgattatccagggttttcgaagttacagagatcaaacaattgtagatcccttcagttcaaaacataatgtgattgtgggcagaaatggatctggaaaaagtaactttttttatgcaattcagtttgttctcagtgatgagtttagtcatcttcgtccagaacagcggttggctttattgcatgaaggtactggtcctcgtgttatttctgcttttgtggagattatttttgataattcagacaaccggttaccaatcgataaagaggaagtttcacttcgaagagttattggtgccaaaaaggatcagtatttcttagacaagaagatggtcacgaaaaatgatgtgatgaacctccttgaaagcgctggtttttctcgaagcaatccttattatattgttaaacaaggaaagatcaaccagatggcaacagcaccagattctcagagattaaagctattaagagaagtagctggtactagagtgtatgacgaacgaaaggaagaaagcatctccttaatgaaagaaacagagggcaaacgggaaaaaatcaatgagttgttaaaatacattgaagagagattacatactctagaggaagaaaaggaagaactagctcagtatcagaagtgggataaaatgagacgagccctggaatataccatttacaatcaggaacttaacgagactcgtgccaaacttgatgagctttctgctaagcgagagactagtggagaaaaatccagacaattaagagatgctcagcaggatgcaagagataaaatggaggatatcgaacgccaagttagagaattgaaaacaaaaatttcagctatgaaagaagaaaaagaacagcttagtgctgaaagacaagagcagattaagcagaggactaagttggagcttaaagccaaggatttacaagatgaactagcaggcaatagtgaacaaaggaaacgtttattaaaagagaggcagaagctgcttgaaaaaatagaagaaaagcagaaagaactggcagaaacagaacccaaattcaacagtgtgaaagagaaagaagaacgaggaattgctagattggctcaagctacccaggaaagaacggatctttatgcaaagcagggtcgaggaagccagtttacatcaaaagaagaaagggataagtggattaaaaaggaactcaagtctttagatcaggctattaatgacaagaaaagacagattgctgctatacataaggatttggaagacactgaagcaaataaagagaaaaatctggagcagtataataaactggaccaggatcttaatgaagtcaaagctcgagtagaagaactggacagaaaatattacgaagtaaaaaataagaaagatgaactacaaagtgaaagaaactacttgtggagagaagagaatgcagaacagcaagcacttgctgctaaaagagaagatcttgaaaagaagcaacaacttcttagagcagcaacaggaaaggccattttaaatggaatagacagcataaacaaagtgctagaccacttccgtcgaaaaggaataaaccagcatgttcaaaatggctatcatggtattgtaatgaataactttgaatgtgaaccagctttctacacatgcgtggaagtcactgctggaaacaggttattttatcacattgttgattcagatgaagtcagcacgaagattttaatggagtttaataaaatgaatcttcctggagaggttacttttctgcctcttaacaagttagatgtcagggatacagcctatcctgaaaccaatgatgctattcctatgatcagcaaactgaggtacaatcccagatttgacaaagctttcaaacatgtgtttggaaagactcttatttgtcgtagcatggaagtttcaacccagctggcccgtgctttcactatggactgtattactttggaaggtgaccaagtcagccatcggggtgctctaactgggggttattatgacacaaggaagtctcgacttgaattgcaaaaagatgttagaaaagcagaagaagaactaggtgaacttgaagcaaagctcaatgaaaacctgcgcagaaatattgaaaggattaataatgaaattgatcagttgatgaaccaaatgcaacagatcgagacccagcaaaggaaatttaaagcatctagagatagcatattatcagaaatgaagatgctaaaagagaagaggcagcagtcagagaaaaccttcatgcctaagcaacgtagcttacagagtttggaggcaagcttgcatgctatggagtctaccagagagtcattgaaagcagaactgggaactgatttgctttctcaactgagtttggaagatcagaagagagtagatgcactgaatgatgagattcgtcaacttcagcaggaaaacagacagttgctaaatgaaagaattaaattagaaggtattattactcgagtagagacttatctcaatgagaatctgagaaaacgcttggaccaagtagaacaggaacttaatgagctgagagagacagaagggggtactgttctcacagccacaacatcagaacttgaagccatcaataaaagagtaaaagacactatggcacgatcagaagatttggacaattccattgataaaacagaagctggaattaaggagcttcagaagagtatggagcgctggaaaaatatggaaaaagaacatatggatgctataaatcatgatactaaagaactggaaaagatgacaaatcggcaaggcatgctattgaagaagaaagaagagtgtatgaagaaaattcgagaacttggatcacttccccaggaagcatttgaaaagtaccagacactgagcctcaaacagttgtttcgaaaacttgagcagtgcaacacagaattaaagaagtacagccatgttaacaaaaaggctttggatcagtttgtaaatttctccgagcagaaagaaaagttaataaagcgtcaagaagagttagataggggttacaaatcaatcatggaactgatgaatgtacttgaacttcggaaatatgaagctattcagttaactttcaaacaggtatctaagaacttcagtgaagtattccagaagttagtacctggtggcaaagctactttggtgatgaagaaaggagatgtggagggcagtcagtctcaagatgaaggagaagggagtggtgagagtgagaggggttctggctcacaaagcagtgtcccatcagttgaccagtttactggagttggaattagggtgtcatttacaggaaaacaaggtgaaatgagagaaatgcaacagctttcaggtggacagaaatccttggtagcccttgctctgatttttgccattcagaaatgtgacccggctccattttacttgtttgatgaaattgaccaggctctggatgctcagcacagaaaggctgtgtcagatatgattatggaacttgctgtacatgctcagtttattacaactacttttaggcctgaactgcttgagtcagctgacaaattctatggtgtaaagttcagaaataaggttagtcatattgatgtgatcacagcagagatggccaaagactttgtagaagatgataccacacatggttaattggaaaatactacctactggtttgggagatgtatatagtaatatgattctcatacccaggaactgtaaatttaaacctaaatatttggccaatagttttcagacttaaagcatcatagtccttttatatttgtctttgtattttataagatactctgtaatgtcatgtttgtactgatagtttaagaatttaatttcctgtacaactttttgtaaaatgttctgctcctattttaaatgttttgaaacatgctaaatattctttcctaattattttatcacttatactaccttttttatagcttcaattaaataatcggttttatgactaaaaaaaaaaaaaaaaaaaaa

SEQ ID NO: 74 - DNA, 7523 bp, Homo sapiens
gtccgggttcgcttgcctcgtcagcgtccgcgtttttcccggccccccccaacccccccggacaggacccccttgagcttgtccctcagctgccaccatgagcgaccaagatcactccatggatgaaatgacagctgtggtgaaaattgaaaaaggagttggtggcaataatgggggcaatggtaatggtggtggtgccttttcacaggctcgaagtagcagcacaggcagtagcagcagcactggaggaggagggcagggtgccaatggctggcagatcatctcttcctcctctggggctacccctacctcaaaggaacagagtggcagcagtaccaatggcagcaatggcagtgagtcttccaagaatcgcacagtctctggtgggcagtatgttgtggctgccgctcccaacttacagaaccagcaagttctgacaggactacctggagtgatgcctaatattcagtatcaagtaatcccacagttccagaccgttgatgggcaacagctgcagtttgctgccactggggcccaagtgcagcaggatggttctggtcaaatacagatcataccaggtgcaaaccaacagattatcacaaatcgaggaagtggaggcaacatcattgctgctatgccaaacctactccagcaggctgtccccctccaaggcctggctaataatgtactctcaggacagactcagtatgtgaccaatgtaccagtggccctgaatgggaacatcaccttgctacctgtcaacagcgtttctgcagctaccttgactcccagctctcaggcagtcacgatcagcagctctgggtcccaggagagtggctcacagcctgtcacctcagggactaccatcagttctgccagcttggtatcatcacaagccagttccagctcctttttcaccaatgccaatagctactcaactactactaccaccagcaacatgggaattatgaactttactaccagtggatcatcagggaccaactctcaaggccagacaccccagagggtcagtgggctacaggggtctgatgctctgaacatccagcaaaaccagacatctggaggctcattgcaagcaggccagcaaaaagaaggagagcaaaaccagcagacacagcagcaacaaattcttatccagcctcagctagttcaagggggacaggccctccaggccctccaagcagcaccattgtcagggcagacctttacaactcaagccatctcccaggaaaccctccagaacctccagcttcaggctgttccaaactctggtcccatcatcatccggacaccaacagtggggcccaatggacaggtcagttggcagactctacagctgcagaacctccaagttcagaacccacaagcccaaacaatcaccttagccccaatgcagggtgtttccttggggcagaccagcagcagcaacaccactctcacacccattgcctcagctgcttccattcctgctggcacagtcactgtgaatgctgctcaactctcctccatgccaggcctccagaccattaacctcagtgcattgggtacttcaggaatccaggtgcacccaattcaaggcctgccgttggctatagcaaatgccccaggtgatcatggagctcagcttggtctccatggggctggtggtgatggaatacatgatgacacagcaggtggagaggaaggagaaaacagcccagatgcccaaccccaagccggtcggaggacccggcgggaagcatgcacctgcccctactgtaaagacagtgaaggaaggggctcgggggatcctggcaaaaagaaacagcatatttgccacatccaaggctgtgggaaagtgtatggcaagacctctcacctgcgggcacacttgcgctggcatacaggcgagaggccatttatgtgtacctggtcatactgtgggaaacgcttcacacgttcggatgagctacagaggcacaaacgtacacacacaggtgagaagaaatttgcctgccctgagtgtcctaagcgcttcatgaggagtgaccacctgtcaaaacatatcaagacccaccagaataagaagggaggcccaggtgtagctctgagtgtgggcactttgcccctggacagtggggcaggttcagaaggcagtggcactgccactccttcagcccttattaccaccaatatggtagccatggaggccatctgtccagagggcattgcccgtcttgccaacagtggcatcaacgtcatgcaggtggcagatctgcagtccattaatatcagtggcaatggcttctgagatcaggcacccggggccagagacatatgggccataccccttaaccccgggatgcaaggtagcatgggtccaagagacatggaagagagagccatgaagcattaaaatgcatggtgttgagaagaatcaggagagggatacaagagaggagatggggtcccggcacccatctgtatcatcagtgcctctttgaaggtgggaaacattagtgaaaattctgttggtgccacgctttgatgagcatttgtttgaccccagtttcttcttacacttcttaccccagcctacccttcctgcatttctcttctcagctcttccatgatggattcccccccctttcctaaagccatcatgccttgataaatatatatgatcattgaaatactttttaacaaaaaacagattctatattattatatatatatatatatatataaagatatatagagatgcattcacaggggttggctgggaggaggaagaccattctgtgaccaaaataccttggtcattttttttatattgccttatttccctatggctgagccttgttgtgacacatcaagcttttctgtagatgttgtcttggcttcccaccagcttaagcgttcatatgctctgcttttagttcatatatacatacataatgtttttcctttcttaattttgtctttttgtttgggatcagcttcttgcactccttccctaactcaactgttgccgtctcatcttctctcatctgatcacttcatgttttgtttttgttactgcctggatgaggcacttctgtcaattttttcaggaccttagttccagcagcagaatggaaaaatccttgaagcccaggctgatgcttgaagtaactgtggagggagtgttcaaaatactactgacgcaggcaccttcttggcgctggagagtcaaaggcatctcccttcattagctgctctgagcatcaagaattagaagtctttcagtggaattgtacaagagtccctttgaagataataatcttggctcagtttgtataaactgtcaaattttcaaataataggtagggggctttcactaggaaaatcatgtgctcagaagaggaaatgactcgtagtcaggttcaggagttagtggagtatttggactttggtactgctgtcttccaaggtagctctaagttttgatgtgtgggcttctgagtttatattctgaaaggaaatacacttcttttgaacatccccactaggttcttttccattgtcaataaggagcatcagccagtgaatctgtttcaggtttccattctgcagaactcctccaaagcatgtgctagtggcaagacagtggttcttatgatgttttcccttaacttttccttgtatgttcttgggtggttcctaagggaaagggaagcacatgatcatgggaatgatagcccagaacaaaaagaaatcttgtcttaccacagtgttttataggagagattgggagaaatcatcctgttttctctgtgacctgatttcagaagagactgatccaaaaattataacggcagggaacctagtgcatttggcactgagatttaaatgcaaccagaattgtcctcaaggcccagccataaaagcattgtctctctcgaccttctggtatcttgttagagagcttttcactgtgaggaagtgtggaaaaatagctctgtgtgtgtgtgtgtgtgtgtgtgtgtgtgtgtgtgtaatctgttaggttggggataggttttctgctagccaatattaaaagagacctgcaataaaaaaattaccctgatctgatagaaagcaagtgtttttgtatgtgtgggtgaatgtgtgttcatgcccgtatatgtctacacacagatgacaaattatatttgaaatcgttggaaaataaattcagatcaaaatgcctttcaggcccattacctagaaatctatcttaaaacctgggtatgttcctaaggtcatttctttgcttatgctaaattaattacaattatgaatggaggatattctactgtacttttttaaaaagaaactatttttgtgtttgaaagtgaaaccaacatccagatctatagcagagtccttattcttctcataaatctttttactttggctacaaatagatgatggtatgattctattatatattttatataaaatccatccaaattaagttttgggtaagtgtgttgtttaatctgaactatagtaacttaatactctaaacaatagttcactccatttggtcctttctccacagatgtaattatgttttcaactcaggaactatggcaaggaactttccccagatcaaattctattaacgctgagatacaagtcatccatgcacagccactatcataccctttattctcactgaaaggcagaactcagaacctgttattttatgtctgtaatcatgtactttggcatcttttggaggaaaggggcaggataactcactggaatgtacagtattttgctagtgcatttcaaggaatggaatcttctccagtatgaaattaccagatataaaataatgtaatgatgctgaggatataagcttttagaaggtaatttgatggtatttctttctcgaatgaaaagctgctggtttaccctcaaccctattcattagcattaccatgagtgaatttatatctaattatttccacttgccctgttctcttcacaccaaggaagctccagatccagtatcttgtttggcctcaaaacagaagcagcttcttttgtctcccagcagtagtgagccactcagtctcttccacaggaagtttggagcctacattccttgagtcaggagcttattacagaaaaaccccgtttccctgaacttttggctaacagaaattaatttaactgacatgcatattgattctgaaatttttttcctaagtttttttcatttttttgaatgagttttttaaattttttagatgaccaaaacttgcagggcaggggatgcccagaagagtggtgagatagtaaaacacttattccctcatcctttcaggttttcaggttgcccatttatattcatttacatgtcatttgactgtctcactttttacccagaacagtaacaacccacaccgtcttccttcagggatttccaactggcactctgtgggtgctacacagaatgcaatttaatggatatttctcagcctggttcagaataaattgatcctttgatcccagaaagtatatactgaagtgtgggataaagattatgattaggggagggttggagacaaaagctgtaaattactatggctgatttatttctactatatacatatatattttttgcttttgtatatcctatataggaaactaagcattgtattttttttaacaaatctaaaaaagcactatgaactacaggtgtttgactttcaaaatatattttgtattgttaatatcttcacattgtgtgaatactggaagctgcagatctttgctaggacgcaataaatttatatactttttgaggggttcttctggggtgctaatcaggcccctgttatgcttagggggagccctggtgctacttgcttgaagttttcagtgtaagtaccctgatgccttttggaccttgggatcagatcaagagttttggagatcaggtaccaaggaaataaggacagtctagctgcctcaagtgaggggccctttgcatagctctccttccccctcactgaagctgggtagcctattggggttgagagggaaaatgtgaaatctcagaatttatctcccttagaagagagccagtaacttatgtacaaggatgaaagaaaggtcgcagcagtagctttggggaaagggaggaagatatggcacttctccaaccccggaaaacattgcttttgaaaactgctgataaaatatgagccggttattacttctgtttgggagactgtgctctctgtggtgcctctcttggctctactccacagataccagacctcttctaagaggatgagcagaccagctttgaggttgacctgtttctctttgtctgccttcccaaaacaccagcccccaggaagacattaagcagccttaagcttaaattcctactccctcttccaaatttggctcacttgccttagatccaaggcagggaaaggaaaagaaggggggtctctggctttattactcccctaagtctttactctgacttccccaaacccagaaagattttctccacagtgttcatttgaaagaggagtattttgtcccattttccccttcctcattatcaaacagccccagtcttccttgtctctgctaagaaagtagaggcatgatgatctgcctctcaactgccctaagtcctagctaagtatcaggggaaaaaaaaaaaaaaaaagcctaacaaatgggattagactagggctgcaagtagtgaggattttgttgatacctctgctgggatgtgtgctttcccatatcttgccttcaggaattacactgtgccttttccccagggatatgggctctgtctacccagtgctccagtttcccggtaactgctcttgaacattgtggacaagggcaggtcttcatatttttgatcatccctttctcccagtgaaatcccatagcccttacctagagtctagggcacaaagacttcggggaagatacactgagattgacctgaggagacatctacacacaccagtggcagctgccccagggcctgcttccccttcctaagtctgtcatcctctggaagggatgggtggtgctccaatctctggtgcctaaaaacccaagtttatttctctcttaacactggcaataaccagtccacaccactgttgccttttaaaacctcttaataatctcatgctgtgtttgttttgattccaatccaattatcaccagggctgtgtgggtaaatgcttttaaatgctctctcatcttgttcttccccctcaccccccactcttaggtatgtatgatgctaatcttgtccctaagtaagtttcttcctgctccttttgtatcttcctttcttgtctttcctcctaccttttgtctcttggtgttttgggacttttttttttttttttttggccttttgtacaaagattagtttcaatgtagtctgtagcctcctttgtaaaccaattaaaaagttttttaataaaaaaaaaaaa

SEQ ID NO: 75 - DNA, 1826 bp, Homo sapiens
ccgctcagaaagcgcgggaaaggcacgcagccacgccccaagggcgcagcctaggacaggggcttctggagcttctggcagccgtctgccctcatggcctttgcacctatggggcccgaggcctcgttcttcgacgttttggaccgacacagggagtccctgctggctgccctgaggagaggtggcagggagcccccaactgggggaagccgcctggcctccagttctgaggttcttgcatctatagaaaatattatccaagacataatcacaagcttggcaagaaatgaagcacctgcattcacgatagacaacagatcaagctgggaaaacataaagtttgaagattctgtgggtcttcagatggtatcccattgcaccaccagaaagatcaaaagtgattcaccaaaatcagctcaaaaattttctctaatccttaaaatattgtccatgatttataaattagtacagagcaacacttatgcaaccaaaagggacatatattacactgacagtcaactctttggtaaccagactgtcgtcgacaatattatcaatgacatttcttgcatgttaaaagtgtcaaggaggagtctacatatattatctacatcaaaaggtttaattgctggcaacttaagatacatcgaggaagatggcaccaaagtgaattgtacctgtggtgcaacggctgttgctgtgccatcgaatattcaaggaattcggaatttagttacagatgcaaagtttgtattaattgtagaaaaagatgcaacatttcagcggctcctagatgacaacttttgcaacaaattgtctccttgcatcatgattacgggaaagggagttcctgatctaaacacaagacttttagtcaagaaactgtgggatacatttcatgttcctgttttcactcttgtagatgctgatccacatggcatagaaataatgtgcatctataagtatggatctatgtctatgtcttttgaagctcatcatctcacagttccagctattagatggcttggtcttctcccttctgatcttaaaagattaaatgtacctaaagatagtttgattccactgacaaaaagggaccaaatgaaacttgacagtatcctgaggagaccttatgttacctgccaaccattttggagaaaagaaatggaaataatggcagactctaaaatgaaggcagaaattcaagctttgactttcctatcatcagattatctttccagagtgtacttacctaacaaattaaaatttggaggatggatataaaaataaatcagaagaacttctgattgccagaggcttttcattagttttgttttgattggcaaatactattgtggaaagaacatatattatattcttaattctgtaaaagtgaaataaaataactttccgttaattatatatttttgtcaaaacaaatgctgtactccaattttctttgcaaggccttattcttgcctctatagagacagatttctgtcctatcttctaaagcaaattataaaagaatatgttattttgacctttaaattatttttgaaaaaataatattttatacatgtcatcaaagtctacaaaatatttaccttctacgatacaactaatgttaacgcataaagtatcttactggtaacaaaaatcataatgatctgaatttgagatgttgcaaatgaattgtggtgtccggtagtttcttcttacattttcctttgcctttatactttaggggtcttactccattaattcatttgttacattagtaaaattcagtatgaataaatatttggattgatgtaaaaaaaaaa

SEQ ID NO: 76 - DNA, 4414 bp, Homo sapiens
agatggccggagtaaaagaaggagggaggtgctgcggtggtgggggtgatcttggcttcactagaatccccagttcttcccctctctacagttttgtctctgaggtcacaaaacctgtggcccccaagacacacatgcgcacacacgcgcgtgcacacacacaccccacacatttattttttaatctaggggctcaaaagatgacacgcgccagagctggaaggcgtcgccaattggtccacttttccctcctccctttttgcggatgagaaaactgaggcccaggtttgggatttccagagcccgggatttcccggcaacgcccgacaaccacattcccccggctattctgacccgccccggttccgggacgctccctgggagccgccgccgagggcctgctgggactcccgggggaccccgccgtcggggcagcccccacgcccggcgccgcccgccgggaacggccgccgctgttgcgcacttgcaggggagccggcgactgagggcgaggcagggagggagcaagcggggctgggagggctgctggcgcgggctcgcgcgctgtgtatggtctatcgcaggcagctgacctttgaggaggaaatcgctgctctccgctccttcctgtagtaacagccgccgctgccgccgccgccaggaaccccggccgggagcgagagccgcggggcgcagagccggcccggctgccggacggtgcggccccaccaggtgaacggccatggcgggctggatccaggcccagcagctgcagggagacgcgctgcgccagatgcaggtgctgtacggccagcacttccccatcgaggtccggcactacttggcccagtggattgagagccagccatgggatgccattgacttggacaatccccaggacagagcccaagccacccagctcctggagggcctggtgcaggagctgcagaagaaggcggagcaccaggtgggggaagatgggtttttactgaagatcaagctggggcactacgccacgcagctccagaaaacatatgaccgctgccccctggagctggtccgctgcatccggcacattctgtacaatgaacagaggctggtccgagaagccaacaattgcagctctccggctgggatcctggttgacgccatgtcccagaagcaccttcagatcaaccagacatttgaggagctgcgactggtcacgcaggacacagagaatgagctgaagaaactgcagcagactcaggagtacttcatcatccagtaccaggagagcctgaggatccaagctcagtttgcccagctggcccagctgagcccccaggagcgtctgagccgggagacggccctccagcagaagcaggtgtctctggaggcctggttgcagcgtgaggcacagacactgcagcagtaccgcgtggagctggccgagaagcaccagaagaccctgcagctgctgcggaagcagcagaccatcatcctggatgacgagctgatccagtggaagcggcggcagcagctggccgggaacggcgggccccccgagggcagcctggacgtgctacagtcctggtgtgagaagttggccgagatcatctggcagaaccggcagcagatccgcagggctgagcacctctgccagcagctgcccatccccggcccagtggaggagatgctggccgaggtcaacgccaccatcacggacattatctcagccctggtgaccagcacattcatcattgagaagcagcctcctcaggtcctgaagacccagaccaagtttgcagccaccgtacgcctgctggtgggcgggaagctgaacgtgcacatgaatcccccccaggtgaaggccaccatcatcagtgagcagcaggccaagtctctgcttaaaaatgagaacacccgcaacgagtgcagtggtgagatcctgaacaactgctgcgtgatggagtaccaccaagccacgggcaccctcagtgcccacttcaggaacatgtcactgaagaggatcaagcgtgctgaccggcggggtgcagagtccgtgacagaggagaagttcacagtcctgtttgagtctcagttcagtgttggcagcaatgagcttgtgttccaggtgaagactctgtccctacctgtggttgtcatcgtccacggcagccaggaccacaatgccacggctactgtgctgtgggacaatgcctttgctgagccgggcagggtgccatttgccgtgcctgacaaagtgctgtggccgcagctgtgtgaggcgctcaacatgaaattcaaggccgaagtgcagagcaaccggggcctgaccaaggagaacctcgtgttcctggcgcagaaactgttcaacaacagcagcagccacctggaggactacagtggcctgtccgtgtcctggtcccagttcaacagggagaacttgccgggctggaactacaccttctggcagtggtttgacggggtgatggaggtgttgaagaagcaccacaagccccactggaatgatggggccatcctaggttttgtgaataagcaacaggcccacgacctgctcatcaacaagcccgacgggaccttcttgttgcgctttagtgactcagaaatcgggggcatcaccatcgcctggaagtttgactccccggaacgcaacctgtggaacctgaaaccattcaccacgcgggatttctccatcaggtccctggctgaccggctgggggacctgagctatctcatctatgtgtttcctgaccgccccaaggatgaggtcttctccaagtactacactcctgtgctggctaaagctgttgatggatatgtgaaaccacagatcaagcaagtggtccctgagtttgtgaatgcatctgcagatgctgggggcagcagcgccacgtacatggaccaggccccctccccagctgtgtgcccccaggctccctataacatgtacccacagaaccctgaccatgtactcgatcaggatggagaattcgacctggatgagaccatggatgtggccaggcacgtggaggaactcttacgccgaccaatggacagtcttgactcccgcctctcgccccctgccggtcttttcacctctgccagaggctccctctcatgaatgtttgaatcccacgcttctctttggaaacaatatgcaatgtgaagcggtcgtgttgtgagtttagtaaggctgtgtacactgacacctttgcaggcatgcatgtgcttgtgtgtgtgtgtgtgtgtgtgtccttgtgcatgagctacgcctgcctcccctgtgcagtcctgggatgtggctgcagcagcggtggcctcttttcagatcatggcatccaagagtgcgccgagtctgtctctgtcatggtagagaccgagcctctgtcactgcaggcactcaatgcagccagacctattcctcctgggcccctcatctgctcagcagctatttgaatgagatgattcagaaggggaggggagacaggtaacgtctgtaagctgaagtttcactccggagtgagaagctttgccctcctaagagagagagacagagagacagagagagagaaagagagagtgtgtgggtctatgtaaatgcatctgtcctcatgtgttgatgtaaccgattcatctctcagaagggaggctggggttcattttcgagtagtattttatactttagtgaacgtggactccagactctctgtgaaccctatgagagcgcgtctgggcccggccatgtccttagcacaggggggccgccggtttgagtgagggtttctgagctgctctgaattagtccttgcttggctgcttggccttgggcttcattcaagtctatgatgctgttgcccacgtttcccgggatatatattctctcccctccgttgggccccagccttctttgcttgcctctctgtttgtaaccttgtcgacaaagaggtagaaaagattgggtctaggatatggtgggtggacaggggccccgggacttggagggttggtcctcttgcctcctggaaaaaacaaaaacaaaaaactgcagtgaaagacaagctgcaaatcagccatgtgctgcgtgcctgtggaatctggagtgaggggtaaaagctgatctggtttgactccgctggaggtggggcctggagcaggccttgcgctgttgcgtaactggctgtgttctggtgaggccttgctcccaaccccacacgctcctccctctgaggctgtaggactcgcagtcaggggcagctgaccatggaagattgagagcccaaggtttaaacttctctgaagggaggtggggatgagaagaggggtttttttgtactttgtacaaagaccacacatttgtgtaaacagtgttttggaataaaatatttttttcataaaaaaaaaaaaaaaa

SEQ ID NO: 77 - DNA, 1119 bp, Homo sapiens
agcttgcctcagaagcgtcgcggagaaggggccacctcaggtgaagcgcgcttgtggaggagttgtggaggacgcctgtcgacgaccagtaactggtcctcggccattgcggaagcatctaaatatggtgtcctccggaaaaaagtattccaggaaatctgggaagccgtctgtggaagatcagtttacgagagcctatgactttgagactgaagataagaaagatctgagtggatcagaggaagatgttattgaagggaagactgcagtcattgagaaacgtaggaagaaaaggtcttctgcaggagtagttgaagatatggggggtgaagtgcagaatatgctggaaggagttggagttgacattaacaaggctcttcttgccaagagaaagagactagaaatgtataccaaggcttctctcaaaactagtaaccagaaaattgaacatgtttggaaaacacaacaagatcaaaggcagaagcttaaccaagaatattctcagcagtttctgactttgtttcagcagtgggatttagatatgcagaaagctgaggaacaagaagaaaaaatacttaatatgtttcgacagcaacaaaagattcttcaacaatctagaattgttcagagccagagattgaaaacaattaaacagttatatgagcagttcataaagagtatggaagagttggagaagaatcatgataatctacttactggtgcacaaaatgaatttaaaaaagaaatggctatgttgcaaaaaaaaattatgatggaaactcagcagcaagagatagcaagtgttcggaagtctcttcaatccatgttattctgatgactctttgaagaaagaacttgaacctaagtaatatgatacaattataacgttagctaagaagcatattgtaagtctttagaatagtttaattgtaacatctttaatcataaacctgtttcattgtaagacctccctttctgttaagtcaaatctaaatagttatgagttagttagcaactattcctaaagaatatgtattaagctttcagctctttagtaatgatagtgaatttttctctctaacactgtcaattaaataaagacgatttaattttaaaaaa

SEQ ID NO: 78 - DNA, 10155 bp, Homo sapiens
atgcccagtgatgccaaagacagtgttaatggtgaccttttgttaaattggacaagtcttaaaaatattttaagtggtcttaatgcttcttttcctcttcacaacaatactggctcaagcacagtcactacttcaaaatccatcaaagacccaagactgatgaggagagaagaaagtatgggagaacagagtagtactgcaggcttaaatgaggttttgcaatttgagaagagttcagataatgttaattcagaaataaaatcgacaccatctaattctgcctcctcctcagaagttgtccctggtgattgtgctgttcttactaatggtttggataccccttgctttaaaacttctgttaatgattcacaatcttgggctcacaacatgggctctgaggactatgactgtatacctcccaataaagttaccatggcagggcaatgtaaggaccaaggtaatttttccttcccaatttctgtgtcaaatgtagtgtcagaggttgagaaccaaaaccacagtgaggagaaggctcagagagcccaacaggagtccggtaatgcttatacaaaagagtacagtagtcacatttttcaggactcgcagtcttctgatttaaaaacaatttatcagactggttgccaaacgtctacagtttttccactcaaaaagaaagtaagcattgatgaataccttcaaaatactggaaagatgaaaaacttcgctgacctggaagacagttccaaacatgaagaaaagcaaacttcatggaaagaaattgataatgatttcactaatgaaacaaaaatcagtccaatagataattacattgttttgcaccaagaatacaaagagagtgagagtcataattcttttgggaaaagctgtgataaaatattaattactcaagagttagaaataacaaaatcttctacatctaccataaaggataaggatgaactagatcatctagcattggaatggcaaattactccaagttttgagagcctgtcacaaaagcatcctcagcactctgtggagtatgagggtaacattcatacaagtttagccattgctcaaaagctaatggaactgaaattggggaaaataaatcaaaattatgctagcattataactgaagctttcccgaaaccaaaagacataccccaggccaaagaaatgttcattgatacagttatttcatcttataacatagaaacagctcatgacagttcaaattgcagcataactagagaacatatatgtgtccataggaaaaatgaaaatgaaccagtgtcattagagaacattcagagagactataaagaaactgcttatgttgaagataggggtcaggatcacaatctgttctgtaattcacagttaagcaatgatatatggctgaatgttaatttcaaaaaacaaacagatagagaaaaccaaaatgaggctaaagagaatagtgcttcatgtgtagaaaacaacatagagaacatatatggagacaaaaagcaggattctcatacaaacgaaaatttcagcaatatagatgaaaaggaggacaaaaattaccacaatatagaaattttgagttctgaagaattttctactaaatttaacttgatttgcagagaagataatgcagtgtcagcagcaactgcattattagagagtgaagaagataccattagtgccgtgaaacaaaaagatactgaaaatactggaagaagtgtagagcatttggcttccacgacatttcccaaaactgcaagttcttcagtgtgtgtagcctcaaatgctgcaatacagatagctagtgctactatgcctgcattaagcctaaataatgacgatcaccagatataccagtttaaagaaacttgttcttctgaaagtccagattttggtttgttagtaaaacatagggtttctgattgtgaaattgatacggataaaaataaatcacaagaatcatttcatcaatcaataaatgagaacttagttcttcagagcattgaattggaaagtgaaattgaaatagaattagaagattgtgatgatgcttttatatttcaacaagatacacatagccatgaaaacatgctttgtgaagaatttgtgacctcatataaggctctgaagtctcgtatcagttgggaaggtctgttagcacttgataacggggagatggaagttttggaaagcaccacaggaagggagaatagtgatcagcattattctaaggaaagtaactatttttattcctctacacaaaacaatgaaacagaacttaccagcccaattttacttccagatctacaaattaaaattactaatatatttaggccaggattcagcccgacagctgactcccttgcattgaaagatagtttttgcacacatgtaactgaagccacaaaaccggaaataaataaggaagatggagaaattctaggatttgacatttattcccagccttttggtgaaaatgcagattatccatgtgaagataaagttgataatataaggcaagaatcagggccagtgagtaactctgaaatctccctttcttttgacttgagtcgtaatacagatgtgaatcatacgtctgaaaatcagaacagtgaatctttgtttactgaaccttctaatgtcacaacaatagatgatggaagcagatgtttctttacaaaatcaaaaactgactataatgataccaaaaataaaaaggaggtagaatcaagaattagcaaaaggaagctacatatatcttccagggatcagaacataccacataaagatttaagacgacataaaatttatgggagaaagaggaggctaaccagtcaagactcatctgagtgtttctcttcattatcccaaggacgaattaaaacattttcacagtcagaaaagcacattaagagtgtcctaaatatcctaagtgatgaagcatctttatgtaaaagcaaatgtctttccagaaaactagacaaagcagttgttcacttaaaaaaagctcatagaagagttcacacatctttgcagcttataactaaagtaggagaagaaagaaagggcccattaccaaaatcatatgcaataatatgcaataatttctgggaaagttgtgaccttcaaggttatagttctgtgtctcaaagaaaatattattctactaagcatttttcgtcaaaaagaaaatatgacaaacggagaaagaaaagagctccaaaagctgatatttctaaatcattaacccatgtgtcaaagcacaagtcttataaaacaagtggagagaaaaaatgcctttctaggaaaagtatggctagcagtgtctcaaaaagtcaccccaccaccagtcacatgggagaattttgtaatcaagaacatcctgaatcacagttgcctgtatcctccacatcccaaagtacaagtcagtcagtttattataatagcagtgtaagcaatccaagtttatcagaagaacatcagcccttttctggaaaaactgcatatctgttttccccagaccactcagatgagaaactaatagaaaaagaaaatcaaattgatacagcatttttatctagcactagtaaatatgaaaagcttgaaaaacattcagcaaatcataatgttaaagatgcaactaaagaaaacagttgtgacgctaatgaagtaataaatgaaagtaattctgtatctttaagttgcataaaagaaaacataaattctagtacaggcaacgattgtgatgcaacttgcataggtcacacaaaggcgaaaactgacgtacttatatcagtcttagattcaaatgtgaagcactttttaaatgatctctaccaacaaggtaaccttattttatctgattgtaaaagaaacctggaagtaaagtggacagatcctattgagagacccaaacaaaacattattacaggaaacttccttatgggcccattaaacctaactttgatagcaagtaaaaagtacagtattcctcagttatcagccgctgcagtgacagatagtgagggagaatcttcaaaatcttacttggataagcagagaattcttactgtagattcttttgcagcatccagtactgtaccacactgtgagcagagctgtagagaaaaagagcttctaaagacagaacagtgctcttcaggtaattgcctccatacagatgggaatgaaacaaatgtcactgagaattatgagttggatgtagcatcaggaactgaagaagataaaagttatggggaaaatatagtggaattatcttccagtgatagttctctgcttttaaaagataatgtaaaaggctcctcttcagaaacatgtattgtgaagaaagacactgaggacagaataacgtggaaagttaaacaagcggaaaaagcaaaagattctgtttacaaaagaagcatgactgaaggatcaactgttaatactgagtacaaaaatcaaaagaatcagatctcagaagaatcctgcttaaatgagaaaattattacaactaacttgattgattcccatctgagcactaaaaatactaccactgagtcagtccctttgaagaacacagtttctaatccgcttaacaaaagagagaagaagggggaaattaaagttagtaaagactcgcagtctgacttgacattacattcagaaatagcctatatttccaaaccaggaattctaggagttaatcatacgcctattttacctgcccactctgaaacctgtaaagtccctactcttctgaagaaacctgcgtcatacgtgagtgattttaaagaaaaacattgctcagctaatcatacggcccttatagctaatctatctcaaattttgcagagggcagatgaagcatcatctttgcagattctacaggaagaaactaaggtttgtctaaatattctccctttatttgtggaagcttttgaaagaaagcaagaatgttcagttgaacaaatcctgatttcaagagaactgttggtagaccaaaacctgtggaataattgcaaacacacattaaaaccatgtgctgttgacactttggtagaacttcaaatgatgatggaaacaattcaattcattgaaaacaaaaaaaggcacttagaaggtgaaccaacattgcgaagcttgctttggtatgatgaaacactgtatgctgagcttcttggaaaaccacgtggatttcaacagcagtctaatttctatcctggtttccaaggaagattaaaatataatgcattctgtgagttacagacttaccatgatcaattagttgaattgcttgaagaaacaaaaagggaaaagaattcatactatgtattcttaaagtacaaacgacaggttaatgaatgtgaagccataatggagcattgttccgattgctttgatttttctctttctgttccatttacctgtggagttaactttggagatagtttagaagacctggaaatcttaagaaaaagtactttaaagttgatcaatgtatgtggggactctcctaaagttcattcgtatccaggaaaacaggaccatctgtggattatcatagaaatgatctcctcaaaggttaattttattaagaacaacgaggcagtacgtgttaaaatatctctttatggtctggaacatatcttttttgatgctgcaaaaaatcttgtttggaaagagagaacacaatccttcagcaaaaaatactcacaaaagaaggacgaagaaaggctactcagagtgaataaatgtgccttttctaagttgcagaagatatatgatactttgtctaaagatttaaacaatgaaccaatttcccctattgggcttgaggaggatactataattgcttccagaaagtcagatcatccaataaacgaagcaacaattagcatagaaaattctaaatttaacagtaatttgcttgcacacccagatatttgttgtattagtgagatattggatcaggctgaatttgcagaccttaaaaaattacaggatctcaccttgagatgtacagatcacttagaaattttaaaaaaatactttcagatgctacaagataataacatggataatatttttatcacagaagaaaatgttttagacgtggtgataaaccacagccatgaggctatcattttaaagcctgaagctattgaaatgtatattgaaatcgtcatggtctcagaaacaattcactttcttaaaaactcaatagcaaagaaactagacaaacagaggtttcgaggtatgctttggtttgatttgtcacttcttcctgagctggttcagtgccaagaaaaaatggcttctttttcatttcttaaagataactcaacagatgtttgcctttggaaagtgatagagactgctgtttccgaacttaagaaagatctggatattatctgcaaatataatgaagctgttaattgctcatatgctattcatttgctctcaagagaacttcaagaactttcagaaataaaaaagcttctgaagaagtccaagtattttatttccacatatattgactttgtgccatatatagcatccataaattatggaagcactgtgacagagttagaatacaactacaatcaattttctacactgctgaagaatgtaatgtctgcccctaggaaagatttaggaaaaatggcccacattaggaaagtcatgaaaacgattgaacatatgaagatgatatgtactaaaaatgctgaactaaccatttcctttttcctatgccaaatgctgtataacagaaggaagattttacagctgaagagaaaagaaaaaatgaatattcatattgtaaaacctggggaaaataacaataaatttagtatttctacgatgttgcccccagtatcagagtgcataaacaaaaacatctcaaattcctctaaaaaacgaccgagcactgtagacaaatgtgaagactctcaggaacaacagcaagatactactgtttccagttgtaaaaagctaaaggtagacatgaaagatgtcacaaaaatcaacagagaaaaggcaacattcaagcatccaaggactacaggatctcatcccaaaagcgaaaacaaaatagtaccaagttcatgtgacagtctgaaaagaaatcatttaacgccaaaaaaggttgaaatgcaaagatcactacctggctcacttttacccttagagaacccaaaagacacttgcgcatcaaagtcggaaagcaaaatagacttaactgtttcatctgatcacttcagtggacaacaggaaaatttaaatagcatgaagaaaagaaatgtgaacttcagtgctgctgaaacaaaaagtgataagaaagattgtgctgcttttgcaatttgtgaccaaaaaagtgtacatggcacattttcaccagaccatgggacgcttttgcagaaatttcttaaaaattccccagatcccacccaaaaatcctgcctttctgatataaacccagaaactgatgtttctcttgtgcctgatgcgtcggtgctctcaaagccaattttctgttttgtgaaagatgtccatcctgatctagaaatgaatgacacagtctttgaacttcaagataatgatatagtaaattcatctattaaaaattcctcatgcatgacttctccagaacccatctgtatccagaacaaaattcctactctgcagataaacaaactacagcctacagaaactgagtcagaggacaaatacatgaaggatacattgaatcccaatactgtgcatacttttggagcatctgggcatataacccttaatgtgaatcaaggagcagagtactctctttctgaacaacagaatgacaaaaattcaaaagtcctaatgcagaatgctgccacatattggaatgaacttccacagtctgcatgtaacccaacatataattcttctgagcatttatttggaacttcatatccatactctgcttggtgtgtttatcagtacagcaacagcaatggcaatgccattacccagacataccaagggataacatcatatgaagtacagccatctccttctgggctgttgaccacagttgcaagtactgcccagggcacacattctaatcttctgtactctcaatattttacttattttgcgggggagccacaagcaaatggctttgtgccagtgaatgggtattttcaatctcaaatacctgcttctaattttcggcagccaattttttcacaatatgcttctcatcagccattaccacaagctacatacccttaccttcctaatcgatttgtgcctccagaagttccttgggtttatgctccatggcaccaagaatcctttcatccaggacactgaaaatagtcttctgtctattgaaataagacataacaagtttttccaaatattttttacttatatattttttaacatttagcgatttttaatgtttgtaaatgtggtaggaaatataaatcatatggtcctttgtaaaatatacaaataatctaacacatatcatataggacatcaatttctaacatctgatataccagaattatttccatgcaattataaggggagggtaatatgatcaaagttaagcaatagtggtaaaatctttaaaactagattcttgcttctgatatgtttcaatacattgttgatggcattgtgccatttgagctgaaagcaggattttttttcattagtcatcaaaccaagaattttataattcttgacactttattatataatttacaattctatgccagatatggcaaatttcttcaatttcagtattttatagtttctacttgtaaaatatttttaataagaaaaattggtttgcataatctcagtgtttccttgagtagagatgttttaaatgtttatgttggaagcaattgtagttaattatattggcaatgaagcactttcaatgcctttttctacaagagccatttccagaagattattttgtttttggatttcacaatttaaatagttattttaatgattttctagcaaataatagagaataatgtttatgcttatgcagttagtctttattacagtaatttaaacaatgtggcacaaacatagttttttcatgctcttgtcatagacttttctttttaaccttctgcaaaagtaaaaactctcttagtaataatcatcatagggcaacaggatatagtatgtaactgcagtcttgagctgtctcttttcatgtattacctttcttgctcaacagctattcctgttttctgtaagatcctagtcagacagagccctcacaactggatagacctttctcaagggttagccctaaaatgtgacaagagaattggtttggctgaatcacaacaaataactagcaaagcttcagtgcttttgcaaactttttatgtaagcaaactttttgtgttatctggcacaggcctttgaaaagactataattctactttgtttaatgtagagtaactaatttttcaatttagaaagacagtgagaatccccaggataagcctctttatactcacttaaaccaactgggatggaattcagaatacctaagctgcttctttaacatagagatctttaaaaagggaaggtcaagcaaagaactgtaaccgaaagaagtaagagatttgaaaagacgatagagttaaaacaatatttaaaaaacatttctatttggtccatgcagttttatttgaaaatagtctgtcaaaatcagaactcctgaacaactttgaaagcagtaatattaactggtattcaaaaatgaataacagccaaaaatgaataacagccatttgatttatgtttccctcagtcatttggtttatgtttggttatggcaagatgttacagcatttatagttaatactactactaatatgtaaaccaaaagttaaatattctagttaaggattgtttctttaaacaactttcagattctgttgacattgtctttgtggtatttttatttcatgggttttaatttctcttaaagacttacctaaatattcagttacatttttaaaaaatctgtacgtgacagaatattaaaacatggaatatttttgcttcaaaaaaaaaaaaaaaaaaaaaaaaaaaaaaaaaaaaaaaaaaaaa

SEQ ID NO: 79 - DNA, 4116 bp, Homo sapiens
ggagaaggcgggcggaagttccacgccaagatactggattcggtgctgaggcggcggctgcggcacgggaaaggctcagtgactgaagctccaaaggccagcaggctggtggggacgtgaccgaagcgaggctctggttccctttcggtgggcgccatttgagcctcatctctggcttccccaggatgcgccggcagccggggagcggctccgggcgcgaggtctgaggatgatctttcctgtcgcccgctacgcgctccggtggctgcgacggcccgaagaccgtgccttttcccgcgccgccatggagatggccctccgaggcgtgcggaaagtcctctgtgtggccgaaaaaaacgacgcggccaaggggatcgccgacctgctgtcaaacggtcgcatgaggcggagagaaggactttcaaaattcaacaagatctatgaatttgattatcatctgtatggccagaatgttaccatggtaatgacttcagtttctggacatttactggctcatgatttccagatgcagtttcgaaaatggcagagctgcaaccctcttgtcctctttgaagcagaaattgaaaagtactgcccagagaattttgtagacatcaagaaaactttggaacgagagactcgccagtgccaggctctggtgatctggactgactgtgatagagaaggcgaaaacatcgggtttgagattatccacgtgtgtaaggctgtaaagcccaatctgcaggtgttgcgagcccgattctctgagatcacaccccatgccgtcaggacagcttgtgaaaacctgaccgagcctgatcagagggtgagcgatgctgtggatgtgaggcaggagctggacctgaggattggagctgcctttactaggttccagaccctgcggcttcagaggatttttcctgaggtgctggcagagcagctcatcagttacggcagctgccagttccccacactgggctttgtggtggagcggttcaaagccattcaggcttttgtaccagaaatcttccacagaattaaagtaactcatgaccacaaagatggtatcgtagaattcaactggaaaaggcatcgactctttaaccacacggcttgcctagttctctatcagttgtgtgtggaggatcccatggcaactgtggtagaggtcagatctaagcccaagagcaagtggcggcctcaagccttggacactgtggagcttgagaagctggcttctcgaaagttgagaataaatgctaaagaaaccatgaggattgctgagaagctctacactcaagggtacatcagctatccccgaacagaaacaaacatttttcccagagacttaaacctgacggtgttggtggaacagcagacccccgatccacgctggggggcctttgcccagagcattctagagcggggtggtcccaccccacgcaatgggaacaagtctgaccaagctcaccctcccattcaccccaccaaatacaccaacaacttacagggagatgaacagcgactgtacgagtttattgttcgccatttcctggcttgctgctcccaggatgctcaggggcaggagaccacagtggagatcgacatcgctcaggaacgctttgtggcccatggcctcatgattctggcccgaaactatctggatgtgtatccatatgatcactggagtgacaagatcctccctgtctatgagcaaggatcccactttcagcccagcaccgtggagatggtggacggggagaccagcccacccaagctgctcaccgaggccgacctcattgccctcatggagaagcatggcattggtacggatgccactcatgcggagcacatcgagaccatcaaagcccggatgtacgtgggcctcaccccagacaagcggttcctccctgggcacctgggcatgggacttgtggaaggttatgattccatgggctatgaaatgtctaagcctgacctccgggctgaactggaagctgatctgaagctgatctgtgatggcaaaaaggacaaatttgtggttctaaggcagcaagtgcagaaatacaagcaggttttcattgaagcggtggctaaagcaaagaaattggacgaggccttggcccagtactttgggaatgggacagagttggcccagcaagaagatatctacccagccatgccagagcccatcaggaagtgcccacagtgcaacaaggacatggtccttaagaccaagaagaatggcgggttctacctcagctgcatgggtttcccagagtgtcgctcagctgtgtggcttcctgactcggtgctggaggccagcagggacagcagtgtgtgtccagtttgtcagccacaccctgtgtacaggttaaagttaaagtttaagcgcggtagccttcccccgaccatgcctctggagtttgtttgctgcatcggcggatgcgacgacaccctgagggagatcctggacctgagattttcagggggcccccccagggctagccagccctctggccgcctgcaggctaaccagtccctgaacaggatggacaacagccagcacccccagcctgctgacagcagacagactgggtcctcaaaggctctggcccagaccctcccaccacccacggctgctggtgaaagcaattctgtgacctgcaactgtggccaggaggctgtgctgctcactgtccgtaaggagggccccaaccggggccggcagttctttaagtgcaacggaggtagctgcaacttcttcctgtgggcagacagccccaatccgggagcaggagggcctcctgccttggcatatagacccctgggcgcctccctgggatgcccaccaggcccagggatccacctaggtgggtttggcaaccctggtgatggcagtggtagtggcacatcctgcctttgcagccagccctccgtcacacggactgtgcagaaggatggacccaacaaggggcgccagttccacacatgtgccaagccgagagagcagcagtgtggctttttccagtgggtcgatgagaacaccgctccagggacttctggagccccgtcctggacaggagacagaggaagaaccctggagtcggaagccagaagcaaaaggccccgggccagttcctcagacatggggtccacagcaaagaaaccccggaaatgcagcctttgccaccagcctggacacacccgtcccttttgtcctcagaacagatgagctcagggtagggtagagaacgccactttctcagacctgtcccctttgtgtttagaaatgagttaaccaggaccaagtggccatttagtgtcctggaaacttagaggacagtgttggcctttggagtcgggccttcttgtgttaaggggcacaaggtccagatcactctggagcaggccagctctgctggacagtgaccctcttcccaggcctcaggagtgaccatagccactgctgaaaagtcacgcagctgctccctcggaccccccaaggatggttgctgttagcagaggattggtgcagtcccagctgaagcccactgtgtgccaaaggaagaagctcccagggctgcttccttcacctgcagaaagccccaagtgagccaccagcactcatggggcagtccctgtccaggctgcccagggcttctcatagacgtcctgagaaggacggtgtaatgcaaggaaatggctgtggtaacactgatccttcagaagaagcttcattccctcttaatctagttaagccaggacatccagaattcattgctttaataaagaacccaggccgggtgcagtggctcatgcctgtaatcccagcactttgggaggctgtggggggcggattgcctgagctcaggagttcgagaccagccagggcaacatggtgaaaccctgtctctactaaaatacaaaaaattagccaggtgtggcggtgtgcgcctgtagacccggctactcaggaggctgaggcaggagaattgcttgaacccgggaggcggaggttgcagttagctgagattgcgccactggacgacagagcgagactcagtctcaaaaaaaatttaaaaatttaaaaaaataaaaagaatccaaccccgg

SEQ ID NO: 80 - DNA, 2591 bp, Homo sapiens
gatgggattggggttttcccctcccatgtgctcaagactggcgctaaaagttttgagcttctcaaaagtctagagccaccgtccagggagcaggtagctgctgggctccggggacactttgcgttcgggctgggagcgtgctttccacgacggtgacacgcttccctggattggcagccagactgccttccgggtcactgccatggaggagccgcagtcagatcctagcgtcgagccccctctgagtcaggaaacattttcagacctatggaaactacttcctgaaaacaacgttctgtcccccttgccgtcccaagcaatggatgatttgatgctgtccccggacgatattgaacaatggttcactgaagacccaggtccagatgaagctcccagaatgccagaggctgctccccccgtggcccctgcaccagcagctcctacaccggcggcccctgcaccagccccctcctggcccctgtcatcttctgtcccttcccagaaaacctaccagggcagctacggtttccgtctgggcttcttgcattctgggacagccaagtctgtgacttgcacgtactcccctgccctcaacaagatgttttgccaactggccaagacctgccctgtgcagctgtgggttgattccacacccccgcccggcacccgcgtccgcgccatggccatctacaagcagtcacagcacatgacggaggttgtgaggcgctgcccccaccatgagcgctgctcagatagcgatggtctggcccctcctcagcatcttatccgagtggaaggaaatttgcgtgtggagtatttggatgacagaaacacttttcgacatagtgtggtggtgccctatgagccgcctgaggttggctctgactgtaccaccatccactacaactacatgtgtaacagttcctgcatgggcggcatgaaccggaggcccatcctcaccatcatcacactggaagactccagtggtaatctactgggacggaacagctttgaggtgcgtgtttgtgcctgtcctgggagagaccggcgcacagaggaagagaatctccgcaagaaaggggagcctcaccacgagctgcccccagggagcactaagcgagcactgcccaacaacaccagctcctctccccagccaaagaagaaaccactggatggagaatatttcacccttcagatccgtgggcgtgagcgcttcgagatgttccgagagctgaatgaggccttggaactcaaggatgcccaggctgggaaggagccaggggggagcagggctcactccagccacctgaagtccaaaaagggtcagtctacctcccgccataaaaaactcatgttcaagacagaagggcctgactcagactgacattctccacttcttgttccccactgacagcctcccacccccatctctccctcccctgccattttgggttttgggtctttgaacccttgcttgcaataggtgtgcgtcagaagcacccaggacttccatttgctttgtcccggggctccactgaacaagttggcctgcactggtgttttgttgtggggaggaggatggggagtaggacataccagcttagattttaaggtttttactgtgagggatgtttgggagatgtaagaaatgttcttgcagttaagggttagtttacaatcagccacattctaggtaggggcccacttcaccgtactaaccagggaagctgtccctcactgttgaattttctctaacttcaaggcccatatctgtgaaatgctggcatttgcacctacctcacagagtgcattgtgagggttaatgaaataatgtacatctggccttgaaaccaccttttattacatggggtctagaacttgacccccttgagggtgcttgttccctctccctgttggtcggtgggttggtagtttctacagttgggcagctggttaggtagagggagttgtcaagtctctgctggcccagccaaaccctgtctgacaacctcttggtgaaccttagtacctaaaaggaaatctcaccccatcccacaccctggaggatttcatctcttgtatatgatgatctggatccaccaagacttgttttatgctcagggtcaatttcttttttcttttttttttttttttttctttttctttgagactgggtctcgctttgttgcccaggctggagtggagtggcgtgatcttggcttactgcagcctttgcctccccggctcgagcagtcctgcctcagcctccggagtagctgggaccacaggttcatgccaccatggccagccaacttttgcatgttttgtagagatggggtctcacagtgttgcccaggctggtctcaaactcctgggctcaggcgatccacctgtctcagcctcccagagtgctgggattacaattgtgagccaccacgtccagctggaagggtcaacatcttttacattctgcaagcacatctgcattttcaccccacccttcccctccttctccctttttatatcccatttttatatcgatctcttattttacaataaaactttgctgccacctgtgtgtctgaggggtg

SEQ ID NO: 81 - DNA, 2594 bp, Homo sapiens
aggggccgcggagccgcggctaaggaacgcgggccgcccacccgctcccggtgcagcggcctccgcgccgggttttggcgcctcccgcgggcgcccccctcctcacggcgagcgctgccacgtcagacgaagggcgcagcgagcgtcctgatccttccgcccggacgctcaggacagcggcccgctgctcataagactcggccttagaaccccagtatcagcagaaggacattttaggacgggacttgggtgactctagggcactggttttctttccagagagcggaacaggcgaggaaaagtagtcccttctcggcgattctgcggagggatctccgtggggcggtgaacgccgatgattatataaggacgcgccgggtgtggcacagctagttccgtcgcagccgggatttgggtcgcagttcttgtttgtggatcgctgtgatcgtcacttgacaatgcagatcttcgtgaagactctgactggtaagaccatcaccctcgaggttgagcccagtgacaccatcgagaatgtcaaggcaaagatccaagataaggaaggcatccctcctgaccagcagaggctgatctttgctggaaaacagctggaagatgggcgcaccctgtctgactacaacatccagaaagagtccaccctgcacctggtgctccgtctcagaggtgggatgcaaatcttcgtgaagacactcactggcaagaccatcacccttgaggtcgagcccagtgacaccatcgagaacgtcaaagcaaagatccaggacaaggaaggcattcctcctgaccagcagaggttgatctttgccggaaagcagctggaagatgggcgcaccctgtctgactacaacatccagaaagagtctaccctgcacctggtgctccgtctcagaggtgggatgcagatcttcgtgaagaccctgactggtaagaccatcaccctcgaggtggagcccagtgacaccatcgagaatgtcaaggcaaagatccaagataaggaaggcattcctcctgatcagcagaggttgatctttgccggaaaacagctggaagatggtcgtaccctgtctgactacaacatccagaaagagtccaccttgcacctggtactccgtctcagaggtgggatgcaaatcttcgtgaagacactcactggcaagaccatcacccttgaggtcgagcccagtgacactatcgagaacgtcaaagcaaagatccaagacaaggaaggcattcctcctgaccagcagaggttgatctttgccggaaagcagctggaagatgggcgcaccctgtctgactacaacatccagaaagagtctaccctgcacctggtgctccgtctcagaggtgggatgcagatcttcgtgaagaccctgactggtaagaccatcactctcgaagtggagccgagtgacaccattgagaatgtcaaggcaaagatccaagacaaggaaggcatccctcctgaccagcagaggttgatctttgccggaaaacagctggaagatggtcgtaccctgtctgactacaacatccagaaagagtccaccttgcacctggtgctccgtctcagaggtgggatgcagatcttcgtgaagaccctgactggtaagaccatcactctcgaggtggagccgagtgacaccattgagaatgtcaaggcaaagatccaagacaaggaaggcatccctcctgaccagcagaggttgatctttgctgggaaacagctggaagatggacgcaccctgtctgactacaacatccagaaagagtccaccctgcacctggtgctccgtcttagaggtgggatgcagatcttcgtgaagaccctgactggtaagaccatcactctcgaagtggagccgagtgacaccattgagaatgtcaaggcaaagatccaagacaaggaaggcatccctcctgaccagcagaggttgatctttgctgggaaacagctggaagatggacgcaccctgtctgactacaacatccagaaagagtccaccctgcacctggtgctccgtcttagaggtgggatgcagatcttcgtgaagaccctgactggtaagaccatcactctcgaagtggagccgagtgacaccattgagaatgtcaaggcaaagatccaagacaaggaaggcatccctcctgaccagcagaggttgatctttgctgggaaacagctggaagatggacgcaccctgtctgactacaacatccagaaagagtccaccctgcacctggtgctccgtctcagaggtgggatgcaaatcttcgtgaagaccctgactggtaagaccatcaccctcgaggtggagcccagtgacaccatcgagaatgtcaaggcaaagatccaagataaggaaggcatccctcctgatcagcagaggttgatctttgctgggaaacagctggaagatggacgcaccctgtctgactacaacatccagaaagagtccactctgcacttggtcctgcgcttgagggggggtgtctaagtttccccttttaaggtttcaacaaatttcattgcactttcctttcaataaagttgttgcattcccaataaaaaaaaa

SEQ ID NO: 82 - DNA, 2257 bp, Homo sapiens
gcagggagagcgtgcccgggcacgacagcctggtgcacagccgagaaaacaacagcgcgtgcgcgtagcgacctctttgcgcctgcgccccccttgccagtctttcgccggcaaaaggaggacgtagaaaaggggacaccggaaactcactcttcacccggaaatggttattgaggaacatggcgttgctggtgcgagtccttaggaaccagactagcatttctcagtgggttccagtatgcagccgattgatacctgtgtctcctacccaaggacagggggacagggctctgtctcgcacttcccagaagattaagattgcggccctgcgcatgtatactagctgtgtggagaaaactgacttcgaggaattctttctaaggtgtcagatgcctgatacattcaattcatggtttcttataaccctactccacgtctggatgtgtctagtccgaatgaagcaggaaggccggagtgggaagtacatgtgtcgtatcatagttcattttatgtgggaggatgttcagcagcgcggcagagtcatgggggttaatccctatatcctgaagaagaacatgatcctcatgacaaatcatttctatgcagcgatcttgggatatgatgaggggatcctttcagatgatcatgggctggccgctgccctctggagaaccttcttcaaccggaaatgtgaagaccctcgacatcttgaattgctggtagagtatgtgaggaaacagatacagtacctggactccatgaacggggaggatctgcttctgacaggggaggtgagctggcgccctctagtggagaagaatcctcagagcatcctgaagccccattctccgacttacaacgacgagggactttgatgggctgggccctccgcacggcccgccagctggcttcgaggaacctccaggagagaagtgcctgttggtccaggaccctgcagaaagtggcctgaactgacctctgaacagcatctgtcaaatacctggccccatttgtgttgagtttcctcttagtgtgcccaggagtctgatctgctggggtacagggctgggagaacccctagctctcccggggtgtcctctcccttaggggaagccccgagtgagagtcccccagcacacactccccaaccccctccagcaactacatgtgactgatagcttttcccaaaggccaaggaagggatggtgtaggttcaaaagggaaaccccccagggcctgctgtggcctaggagcagattgtaatgctgccgagtccggtcggtgaccacgcgttgtccctcggctttcagccatggggttgagttggccattaaaagaaacagagacttctctctgccatggcccttctttattccagggacttagaaacttgcctgagatggtggacgcagtaatgagggcaccgcgcagctcagttagagacggagaaagggaagaggctgggatggtctctgctgctcttgcctctagttcatggagatgtgtctctgttcaggccaagatacagccagccaggcctgtcgtctgggacccaggaggcctctgatgaccaagggctttcacatcctaagtcatttggaaggaggccttgagaacaaagtcacctttgtcactcccagtgaactgaatgaggaacatgctgtctcctgtcttggcctcccctttcatgagatactggggagaagagaacattcctcctggcttagttgtagcagacccagacctgtgcccagctttggtcccccttcccaacttctgaagcacgtgctgcagagccaccttggtctgagcacctgaggaccagcccctcctccctcagtgcgggtcatctcttgggggattttcttaaagtgaagaaagggggtggggaaccatattgcccctccctcccccatcaaacttccttcatttaacttgctataaaatgagtcatataaagaaactctatatgggtgaggtatatcccacttctgtgaaaacattacaaatcaaaccgcttctctcagtttatttaagatgcttttgttgcgagcggagctctagagtgaagcctcctgtgtgtgtgtgagataataacaccttgtaactcattacagctgggcactatttacataaaccagagctgagccaggcaggaatttgctgattaatttatttttaatggagtgaagtataccatgcaccaaaataaactttactgtgtgtacctaactgctcctggaaaaaaaaaaaaaaa

SEQ ID NO: 83 - DNA, 3300 bp, Homo sapiens
atggcagtagccccgcgactgtttggggggctctgcttccgtttccgggaccagaatccggaagtggctgttgaggggcgtcttccaatctcgcacagctgcgttggctgtagaagagaacggacggcgatggcgacggtcgcagcaaatccagctgctgctgcggcggctgtggcggcggcagcggcggtgactgaggatagagagccacagcacgaggagctgccaggcctggacagccagtggcgccagatagaaaacggcgagagtgggcgagaacgtccactgcgggccggcgaaagctggttccttgtggagaagcactggtataagcagtgggaggcatacgtgcagggaggggaccaggactccagcaccttccctggctgcatcaacaatgccacactctttcaagatgagataaactggcgcctcaaggagggactggtggaaggcgaggattatgtgctgctcccagcagctgcttggcattacctggtcagctggtatggtctagagcatggccagccacccattgaacgcaaggtcatagagctgcccaacatccagaaggtcgaagtgtacccagtagaactgctgcttgtccggcacaatgatttgggcaaatctcacactgttcagttcagccataccgattctattggcctagtattgcgcacagctcgggagcggtttctggtggagccccaggaagacactcggctttgggccaagaactcagaaggctctttggataggttgtatgacacacacatcacggttctcgatgcggcccttgagactgggcagttgatcatcatggagacccgcaagaaagatggcacttggcccagcgcacagctgcatgtcatgaacaacaacatgtcggaagaggatgaggacttcaagggtcagccaggcatctgtggcctcaccaatctgggcaacacgtgcttcatgaactcggccctgcagtgcctcagcaatgtgccacagctcaccgagtacttcctcaacaactgctacctggaggagctcaacttccgcaacccactgggcatgaagggtgagatcgcagaggcctatgcagacctggtgaagcaggcgtggtctggccaccaccgctccattgtgccacatgtgttcaagaacaaggttggccattttgcatcccaatttctgggctaccagcagcatgactctcaggagctgctgtcattcctcctggacgggctgcatgaggaccttaatcgggtgaagaagaaggagtatgtggagctgtgcgatgctgctgggcgaccggatcaggaggtggcacaggaggcatggcaaaaccacaaacggcggaacgattctgtgatcgtggacactttccacggcctcttcaagtccacgctggtgtgccccgattgtggcaatgtatctgtgaccttcgaccccttctgctacctcagtgttccactgcctatcagccacaagagggtcttggaggtcttctttatccccatggatccgcgccgcaagccagagcagcaccggctcgtggtccccaagaaaggcaagatctcggatctatgtgtggctctgtccaaacacacgggcatctcgccagagaggatgatggtggctgatgtcttcagtcaccgcttctataagctctatcagctagaggagcctctgagcagcatcttggaccgtgatgatatcttcgtctatgaggtgtcaggtcgcattgaggccattgagggctcaagagaggacatcgtggttcctgtctacctgcgggagcgcacccctgcccgtgactacaacaactcctactacggcctgatgctttttggacaccccctcctggtatcagtgccccgggaccgcttcacctgggagggcctgtataacgtcctgatgtaccggctctcacgctacgtgaccaaacccaactcagatgatgaggacgatggggatgagaaagaagatgacgaggaggataaagatgacgtccctgggccctcaactgggggcagcctccgagaccctgagccagagcaggctgggcccagctctggagtcacgaacaggtgcccgttcctcctggacaattgccttggcacatctcagtggcccccaaggcgacgacgcaagcagctgttcaccctgcagacggtgaactccaatgggaccagcgaccgcacaacctcccctgaagaagtccatgcccagccgtacattgctatcgactgggagccagagatgaagaagcgttactatgacgaggtagaggctgagggctacgtgaagcatgactgcgtcgggtacgtgatgaagaaggctcccgtgcggctgcaggagtgcattgagctcttcaccactgtggagaccctggagaaggaaaacccctggtactgcccttcctgcaagcagcaccagctggcaaccaagaagctggacctgtggatgctgccggagattctcatcatccacctgaaacgcttttcctacaccaagttctcccgagagaagctggacaccctcgtggagtttcctatccgggacctggacttctctgagtttgtcatccagccacagaatgagtcgaatccggagctgtacaaatatgacctcatcgcggtttccaaccattatgggggcatgcgtgatggacactacacaacatttgcctgcaacaaggacagcggccagtggcactactttgatgacaacagcgtctcccctgtcaatgagaatcagatcgagtccaaggcagcctatgtcctcttctaccaacgccaggacgtggcgcgacgcctgctgtccccggccggctcatctggcgccccagcctcccctgcctgcagctccccacccagctctgagttcatggatgttaattgagagccctgggtcctgccacagaaaaaaaaaaaaaaaagccctctctgcaatctcgcttctcgtgtccgccccgcttctcttattcgtgttaggtgcccccgccaggcattgcaggcttagtcgtggctactgttctcctgtgccgctgcatcgctctctcccgggaaagaacaggtcgtgtctcctcctagcagtgcgcgccccgcctgtgtttgcccttccagcagtgaccctcccttctagtctttatttatggtcgtgcccttccctctcctcagcccagagtgttctgcgtgggtggtgatgggggttcacctgaacacagagtgtattttcttattgaggccctgtaccttctgctgtgtgtgtgtatatataaagcaccagtctgctccccaaaaaaaaaaa

SEQ ID NO: 84 - DNA, 2003 bp, Homo sapiens
gttaccataacgaccagaagacgctgcagccactagggaggagagcaaagtaatcagaacctcccaaggatggataacaaaatttcgccggaggcccaagtggcggagctggaacttgacgccgtgatcggcttcaatgacatcattttgtgggattataagaacagagagctgcttgctcggctgtcccttcacaaaggcaaaattgaagctctggccttttctccaaatgatttgtacttggtatcactaggaggcccagatgacggaagtgtggtggtgtggagcatagccaagagagatgccatctgtggcagccctgcagccggcctcaatgttggcaatgccaccaatgtgatcttctccaggtgccgggatgagatgtttatgactgctggaaatgggacaattcgagtatgggaattggatcttccaaatagaaaaatctggccaactgagtgccaaacaggacagttgaaaagaatagtcatgagtattggagtggatgatgatgatagctttttctaccttggcaccacgactggagatattctaaaaatgaaccccaggactaaactgctgacagatgttgggcctgcgaaggacaaattcagtttgggagtgtcagctatcaggtgcctgaagatggggggtttgttggtgggctctggagccggactgctggtcttctgtaaaagccctggctacaaacccatcaagaagattcagttacaaggcggcatcacttctatcacacttcgaggagaaggacaccagtttctcgtaggaacagaagaatcgcacatttatcgtgtcagcttcacggatttcaaagagacgctcatagcgacttgtcactttgatgctgtcgaggatattgtctttccatttggcactgctgagctatttgcaacctgtgccaagaaggatatcagggtgtggcacacatcatccaacagggagctgctgcggatcaccgtgcccaacatgacctgccacggcatcgacttcatgagggacggcaaaagcatcatttcagcatggaacgacggtaaaatccgagccttcgccccagagacaggccgactgatgtatgtcattaacaatgctcacaggatcggcgtcaccgccatcgccaccaccagtgactgtaaaagggtcatcagtggcggtggggaaggggaggtgagggtatggcagataggctgtcagacccagaagctggaggaggccctgaaggaacacaagtcatcagtgtcctgcattagggtgaagaggaacaacgaggagtgtgtcaccgccagcaccgatgggacttgtatcatttgggaccttgtgcgtctcaggaggaatcagatgatactagccaacaccttattccagtgtgtgtgctatcaccctgaggagttccagatcatcaccagcggaacagacagaaagattgcttactgggaagtatttgatgggacagtaatcagagaattggaaggttccctgtctgggtcgataaatggcatggatatcacacaggaaggggtgcactttgtcacaggtggaaatgaccatctggtcaaagtttgggattataatgagggtgaagtgactcacgttggggtgggacacagtggcaacatcacacgcatccgcataagtccaggaaatcaatatattgttagtgtaagtgccgatggagccattttgcgatggaagtacccatatacctcctgaagctgatgagatgtctctgagccttggcgttgcacgcagtcctgttgaagactgagtttagataactccaacactagtcttcatttctcacagctctgtttttgttcttgagtcaatttttctctttttctttatagaatgcattttatattcttaaattgcatattaaaattgaagtatgttcaagaataatttgtgcagactctaattagaacttttaacattttgaataaattcttagttgttggttttctgttataaaaaaaaaaaaaaaa

SEQ ID NO: 85 - DNA, 2563 bp, Homo sapiens
ctattggaggagaaggccgagaggagcaggacggcgggaagaggagtgcggaacccgcgggagagtccccagggagacacttaagggaaattaaactgcagagtgcaagagatgcctcagtcaagtcagccaaaaacacgcgggtcatccccaagccccagagagtgacagagccccgatgacacggacacctcggctgctgtcacttccctggttcgggcctcccacaggctttgaattgaaggcgagtgcctcagaatttgcatccattgttctgtctttcctgggaagttattcatcctggtggccagcccaccgacaaaatggatttggatctactggacctgaatcccagaattattgctgcaattaagaaagccaaactgaaatcggtaaaggaggttttacacttttctggaccagacttgaagagactgaccaacctctccagccccgaggtctggcacttgctgagaacggcctccttacacttgcggggaagcagcatccttacagcactgcagctgcaccagcagaaggagcggttccccacgcagcaccagcgcctgagcctgggctgcccggtgctggacgcgctgctccgcggtggcctgcccctggacggcatcactgagctggccggacgcagctcggcagggaagacccagctggcgctgcagctctgcctggctgtgcagttcccgcggcagcacggaggcctggaggctggagccgtctacatctgcacggaagacgccttcccgcacaagcgcctgcagcagctcatggcccagcagccgcggctgcgcactgacgttccaggagagctgcttcagaagctccgatttggcagccagatcttcatcgagcacgtggccgatgtggacaccttgttggagtgtgtgaataagaaggtccccgtactgctgtctcggggcatggctcgcctggtggtcatcgactcggtggcagccccattccgctgtgaatttgacagccaggcctccgcccccagggccaggcatctgcagtccctgggggccacgctgcgtgagctgagcagtgccttccagagccctgtgctgtgcatcaaccaggtgacagaggccatggaggagcagggcgcagcacacgggccgctggggttctgggacgaacgtgtttccccagcccttggcataacctgggctaaccagctcctggtgagactgctggctgaccggctccgcgaggaagaggctgccctcggctgcccagcccggaccctgcgggtgctctctgccccccacctgcccccctcctcctgttcctacacgatcagtgccgaaggggtgcgagggacacctgggacccagtcccactgacacggtggcggctgcacaacagccctgcctgagaagccccgacacacggggctcgggcctttaaaacgcgtctgcctgggccgtggcacagctgggagcctggttcagacacagctcttccagggcagcggctccactttctcatccgaagatggtggccacagactgacccccatctgagctggggggatgttctgcctctccctgggtctggggacaggcccgcttgctgggtacctggtccccactgctgagctggcccttggggagaggtgattctcagggctggagcctggggtgtcctacagtgactccctgggagccgcctgcttcttctctccacatggaagcccaactggggttgcgtctgaggcctgccccctgggctggggcctcagaccccctcagccttgggaccgtgcccacgagggtctcccctcctgcacacagggcagtccttactcccccaccactcaggccacagtggggctgcaggcaggcggctcctcctcacccacctctgggtccttggctcccgggggccccacctcggcacacactgtgccccacaaaacttcagtgtggtacaaggtggagaaagcatatcccaccaacctccagtgtcagggtccaggagagcctgggggtggggggactgccttgtctctagtagtgtggcctgtgccagcaccacagccggtcagaggagcgcaggcagcgcagggctggcacgtgacaggctcgtcagccacctgggaacacagttctgggcaaagaggatccgaggttgagaggaaggagggtcccggtgtatcctggccctgggggtctgggcgtccagctcagccctggcctggctgggtggtattctggtagggatatggcaggactcctggcagggccacctgcaggaccctgtcctgcagtcccacactgtgcagacccagtcccacactgtggccaggccttacatctggctggaaagcagagcctcctgggaacacatctggctgcacaggctgaaatatccacccagcaggcagagtggcgtggcctccccatgggcacagtggtgacccccttgattcccaccgtacaaccccctccaccccccactcagtgcctccacatgctgcctggcacagaccaggcctttgacaaataaatgttcaatggatgcaaaaaaaaaaaaaaaaaaa

SEQ ID NO: 86 - skipped

SEQ ID NO: 87 - protein, 1130 aa, Homo sapiens
MLEICLKLVGCKSKKGLSSSSSCYLEEALQRPVASDFEPQGLSEAARWNSKENLLAGPSENDPNLFVALYDFVASGDNTLSITKGEKLRVLGYNHNGEWCEAQTKNGQGWVPSNYITPVNSLEKHSWYHGPVSRNAAEYLLSSGINGSFLVRESESSPGQRSISLRYEGRVYHYRINTASDGKLYVSSESRFNTLAELVHHHSTVADGLITTLHYPAPKRNKPTVYGVSPNYDKWEMERTDITMKHKLGGGQYGEVYEGVWKKYSLTVAVKTLKEDTMEVEEFLKEAAVMKEIKHPNLVQLLGVCTREPPFYIITEFMTYGNLLDYLRECNRQEVNAVVLLYMATQISSAMEYLEKKNFIHRDLAARNCLVGENHLVKVADFGLSRLMTGDTYTAHAGAKFPIKWTAPESLAYNKFSIKSDVWAFGVLLWEIATYGMSPYPGIDLSQVYELLEKDYRMERPEGCPEKVYELMRACWQWNPSDRPSFAEIHQAFETMFQESSISDEVEKELGKQGVRGAVSTLLQAPELPTKTRTSRRAAEHRDTTDVPEMPHSKGQGESDPLDHEPAVSPLLPRKERGPPEGGLNEDERLLPKDKKTNLFSALIKKKKKTAPTPPKRSSSFREMDGQPERRGAGEEEGRDISNGALAFTPLDTADPAKSPKPSNGAGVPNGALRESGGSGFRSPHLWKKSSTLTSSRLATGEEEGGGSSSKRFLRSCSASCVPHGAKDTEWRSVTLPRDLQSTGRQFDSSTFGGHKSEKPALPRKRAGENRSDQVTRGTVTPPPRLVKKNEEAADEVFKDIMESSPGSSPPNLTPKPLRRQVTVAPASGLPHKEEAGKGSALGTPAAAEPVTPTSKAGSGAPGGTSKGPAEESRVRRHKHSSESPGRDKGKLSRLKPAPPPPPAASAGKAGGKPSQSPSQEAAGEAVLGAKTKATSLVDAVNSDAAKPSQPGEGLKKPVLPATPKPQSAKPSGTPISPAPVPSTLPSASSALAGDQPSSTAFIPLISTRVSLRKTRQPPERIASGAITKGVVLDSTEALCLAISRNSEQMASHSAVLEAGKNLYTFCVSYVDSIQQMRNKFAFREAINKLENNLRELQICPATAGSGPAATQDFSKLLSSVKEISDIVQR

SEQ ID NO: 88 - protein, 3056 aa, Homo sapiens
MSLVLNDLLICCRQLEHDRATERKKEVEKFKRLIRDPETIKHLDRHSDSKQGKYLNWDAVFRFLQKYIQKETECLRIAKPNVSASTQASRQKKMQEISSLVKYFIKCANRRAPRLKCQELLNYIMDTVKDSSNGAIYGADCSNILLKDILSVRKYWCEISQQQWLELFSVYFRLYLKPSQDVHRVLVARIIHAVTKGCCSQTDGLNSKFLDFFSKAIQCARQEKSSSGLNHILAALTIFLKTLAVNFRIRVCELGDEILPTLLYIWTQHRLNDSLKEVIIELFQLQIYIHHPKGAKTQEKGAYESTKWRSILYNLYDLLVNEISHIGSRGKYSSGFRNIAVKENLIELMADICHQVFNEDTRSLEISQSYTTTQRESSDYSVPCKRKKIELGWEVIKDHLQKSQNDFDLVPWLQIATQLISKYPASLPNCELSPLLMILSQLLPQQRHGERTPYVLRCLTEVALCQDKRSNLESSQKSDLLKLWNKIWCITFRGISSEQIQAENFGLLGAIIQGSLVEVDREFWKLFTGSACRPSCPAVCCLTLALTTSIVPGTVKMGIEQNMCEVNRSFSLKESIMKWLLFYQLEGDLENSTEVPPILHSNFPHLVLEKILVSLTMKNCKAAMNFFQSVPECEHHQKDKEELSFSEVEELFLQTTFDKMDFLTIVRECGIEKHQSSIGFSVHQNLKESLDRCLLGLSEQLLNNYSSEITNSETLVRCSRLLVGVLGCYCYMGVIAEEEAYKSELFQKAKSLMQCAGESITLFKNKTNEEFRIGSLRNMMQLCTRCLSNCTKKSPNKIASGFFLRLLTSKLMNDIADICKSLASFIKKPFDRGEVESMEDDTNGNLMEVEDQSSMNLFNDYPDSSVSDANEPGESQSTIGAINPLAEEYLSKQDLLFLDMLKFLCLCVTTAQTNTVSFRAADIRRKLLMLIDSSTLEPTKSLHLHMYLMLLKELPGEEYPLPMEDVLELLKPLSNVCSLYRRDQDVCKTILNHVLHVVKNLGQSNMDSENTRDAQGQFLTVIGAFWHLTKERKYIFSVRMALVNCLKTLLEADPYSKWAILNVMGKDFPVNEVFTQFLADNHHQVRMLAAESINRLFQDTKGDSSRLLKALPLKLQQTAFENAYLKAQEGMREMSHSAENPETLDEIYNRKSVLLTLIAVVLSCSPICEKQALFALCKSVKENGLEPHLVKKVLEKVSETFGYRRLEDFMASHLDYLVLEWLNLQDTEYNLSSFPFILLNYTNIEDFYRSCYKVLIPHLVIRSHFDEVKSIANQIQEDWKSLLTDCFPKILVNILPYFAYEGTRDSGMAQQRETATKVYDMLKSENLLGKQIDHLFISNLPEIVVELLMTLHEPANSSASQSTDLCDFSGDLDPAPNPPHFPSHVIKATFAYISNCHKTKLKSILEILSKSPDSYQKILLAICEQAAETNNVYKKHRILKIYHLFVSLLLKDIKSGLGGAWAFVLRDVIYTLIHYINQRPSCIMDVSLRSFSLCCDLLSQVCQTAVTYCKDALENHLHVIVGTLIPLVYEQVEVQKQVLDLLKYLVIDNKDNENLYITIKLLDPFPDHVVFKDLRITQQKIKYSRGPFSLLEEINHFLSVSVYDALPLTRLEGLKDLRRQLELHKDQMVDIMRASQDNPQDGIMVKLVVNLLQLSKMAINHTGEKEVLEAVGSCLGEVGPIDFSTIAIQHSKDASYTKALKLFEDKELQWTFIMLTYLNNTLVEDCVKVRSAAVTCLKNILATKTGHSFWEIYKMTTDPMLAYLQPFRTSRKKFLEVPRFDKENPFEGLDDINLWIPLSENHDIWIKTLTCAFLDSGGTKCEILQLLKPMCEVKTDFCQTVLPYLIHDILLQDTNESWRNLLSTHVQGFFTSCLRHFSQTSRSTTPANLDSESEHFFRCCLDKKSQRTMLAVVDYMRRQKRPSSGTIFNDAFWLDLNYLEVAKVAQSCAAHFTALLYAEIYADKKSMDDQEKRSLAFEEGSQSTTISSLSEKSKEETGISLQDLLLEIYRSIGEPDSLYGCGGGKMLQPITRLRTYEHEAMWGKALVTYDLETAIPSSTRQAGIIQALQNLGLCHILSVYLKGLDYENKDWCPELEELHYQAAWRNMQWDHCTSVSKEVEGTSYHESLYNALQSLRDREFSTFYESLKYARVKEVEEMCKRSLESVYSLYPTLSRLQAIGELESIGELFSRSVTHRQLSEVYIKWQKHSQLLKDSDFSFQEPIMALRTVILEILMEKEMDNSQRECIKDILTKHLVELSILARTFKNTQLPERAIFQIKQYNSVSCGVSEWQLEEAQVFWAKKEQSLALSILKQMIKKLDASCAANNPSLKLTYTECLRVCGNWLAETCLENPAVIMQTYLEKAVEVAGNYDGESSDELRNGKMKAFLSLARFSDTQYQRIENYMKSSEFENKQALLKRAKEEVGLLREHKIQTNRYTVKVQRELELDELALRALKEDRKRFLCKAVENYINCLLSGEEHDMWVFRLCSLWLENSGVSEVNGMMKRDGMKIPTYKFLPLMYQLAARMGTKMMGGLGFHEVLNNLISRISMDHPHHTLFIILALANANRDEFLTKPEVARRSRITKNVPKQSSQLDEDRTEAANRIICTIRSRRPQMVRSVEALCDAYIILANLDATQWKTQRKGINIPADQPITKLKNLEDVVVPTMEIKVDHTGEYGNLVTIQSFKAEFRLAGGVNLPKIIDCVGSDGKERRQLVKGRDDLRQDAVMQQVFQMCNTLLQRNTETRKRKLTICTYKVVPLSQRSGVLEWCTGTVPIGEFLVNNEDGAHKRYRPNDFSAFQCQKKMMEVQKKSFEEKYEVFMDVCQNFQPVFRYFCMEKFLDPAIWFEKRLAYTRSVATSSIVGYILGLGDRHVQNILINEQSAELVHIDLGVAFEQGKILPTPETVPFRLTRDIVDGMGITGVEGVFRRCCEKTMEVMRNSQETLLTIVEVLLYDPLFDWTMNPLKALYLQQRPEDETELHPTLNADDQECKRNLSDIDQSFNKVAERVLMRLQEKLKGVEEGTVLSVGGQVNLLIQQAIDPKNLSRLFPGWKAWV

SEQ ID NO: 89 - protein, 2644 aa, Homo sapiens
MGEHGLELASMIPALRELGSATPEEYNTVVQKPRQILCQFIDRILTDVNVVAVELVKKTDSQPTSVMLLDFIQHIMKSSPLMFVNVSGSHEAKGSCIEFSNWIITRLLRIAATPSCHLLHKKICEVICSLLFLFKSKSPAIFGVLTKELLQLFEDLVYLHRRNVMGHAVEWPVVMSRFLSQLDEHMGYLQSAPLQLMSMQNLEFIEVTLLMVLTRIIAIVFFRRQELLLWQIGCVLLEYGSPKIKSLAISFLTELFQLGGLPAQPASTFFSSFLELLKHLVEMDTDQLKLYEEPLSKLIKTLFPFEAEAYRNIEPVYLNMLLEKLCVMFEDGVLMRLKSDLLKAALCHLLQYFLKFVPAGYESALQVRKVYVRNICKALLDVLGIEVDAEYLLGPLYAALKMESMEIIEEIQCQTQQENLSSNSDGISPKRRRLSSSLNPSKRAPKQTEEIKHVDMNQKSILWSALKQKAESLQISLEYSGLKNPVIEMLEGIAVVLQLTALCTVHCSHQNMNCRTFKDCQHKSKKKPSVVITWMSLDFYTKVLKSCRSLLESVQKLDLEATIDKVVKIYDALIYMQVNSSFEDHILEDLCGMLSLPWIYSHSDDGCLKLTTFAANLLTLSCRISDSYSPQAQSRCVFLLTLFPRRIFLEWRTAVYNWALQSSHEVIRASCVSGFFILLQQQNSCNRVPKILIDKVKDDSDIVKKEFASILGQLVCTLHGMFYLTSSLTEPFSEHGHVDLFCRNLKATSQHECSSSQLKASVCKPFLFLLKKKIPSPVKLAFIDNLHHLCKHLDFREDETDVKAVLGTLLNLMEDPDKDVRVAFSGNIKHILESLDSEDGFIKELFVLRMKEAYTHAQISRNNELKDTLILTTGDIGRAAKGDLVPFALLHLLHCLLSKSASVSGAAYTEIRALVAAKSVKLQSFFSQYKKPICQFLVESLHSSQMTALPNTPCQNADVRKQDVAHQREMALNTLSEIANVFDFPDLNRFLTRTLQVLLPDLAAKASPAASALIRTLGKQLNVNRREILINNFKYIFSHLVCSCSKDELERALHYLKNETEIELGSLLRQDFQGLHNELLLRIGEHYQQVFNGLSILASFASSDDPYQGPRDIISPELMADYLQPKLLGILAFFNMQLLSSSVGIEDKKMALNSLMSLMKLMGPKHVSSVRVKMMTTLRTGLRFKDDFPELCCRAWDCFVRCLDHACLGSLLSHVIVALLPLIHIQPKETAAIFHYLIIENRDAVQDFLHEIYFLPDHPELKKIKAVLQEYRKETSESTDLQTTLQLSMKAIQHENVDVRIHALTSLKETLYKNQEKLIKYATDSETVEPIISQLVTVLLKGCQDANSQARLLCGECLGELGAIDPGRLDFSTTETQGKDFTFVTGVEDSSFAYGLLMELTRAYLAYADNSRAQDSAAYAIQELLSIYDCREMETNGPGHQLWRRFPEHVREILEPHLNTRYKSSQKSTDWSGVKKPIYLSKLGSNFAEWSASWAGYLITKVRHDLASKIFTCCSIMMKHDFKVTIYLLPHILVYVLLGCNQEDQQEVYAEIMAVLKHDDQHTINTQDIASDLCQLSTQTVFSMLDHLTQWARHKFQALKAEKCPHSKSNRNKVDSMVSTVDYEDYQSVTRFLDLIPQDTLAVASFRSKAYTRAVMHFESFITEKKQNIQEHLGFLQKLYAAMHEPDGVAGVSAIRKAEPSLKEQILEHESLGLLRDATACYDRAIQLEPDQIIHYHGVVKSMLGLGQLSTVITQVNGVHANRSEWTDELNTYRVEAAWKLSQWDLVENYLAADGKSTTWSVRLGQLLLSAKKRDITAFYDSLKLVRAEQIVPLSAASFERGSYQRGYEYIVRLHMLCELEHSIKPLFQHSPGDSSQEDSLNWVARLEMTQNSYRAKEPILALRRALLSLNKRPDYNEMVGECWLQSARVARKAGHHQTAYNALLNAGESRLAELYVERAKWLWSKGDVHQALIVLQKGVELCFPENETPPEGKNMLIHGRAMLLVGRFMEETANFESNAIMKKYKDVTACLPEWEDGHFYLAKYYDKLMPMVTDNKMEKQGDLIRYIVLHFGRSLQYGNQFIYQSMPRMLTLWLDYGTKAYEWEKAGRSDRVQMRNDLGKINKVITEHTNYLAPYQFLTAFSQLISRICHSHDEVFVVLMEIIAKVFLAYPQQAMWMMTAVSKSSYPMRVNRCKEILNKAIHMKKSLEKFVGDATRLTDKLLELCNKPVDGSSSTLSMSTHFKMLKKLVEEATFSEILIPLQSVMIPTLPSILGTHANHASHEPFPGHWAYIAGFDDMVEILASLQKPKKISLKGSDGKFYIMMCKPKDDLRKDCRLMEFNSLINKCLRKDAESRRRELHIRTYAVIPLNDECGIIEWVNNTAGLRPILTKLYKEKGVYMTGKELRQCMLPKSAALSEKLKVFREFLLPRHPPIFHEWFLRTFPDPTSWYSSRSAYCRSTAVMSMVGYILGLGDRHGENILFDSLTGECVHVDFNCLFNKGETFEVPEIVPFRLTHNMVNGMGPMGTEGLFRRACEVTMRLMRDQREPLMSVLKTFLHDPLVEWSKPVKGHSKAPLNETGEVVNEKAKTHVLDIEQRLQGVIKTRNRVTGLPLSIEGHVHYLIQEATDENLLCQMYLGWTPYM

SEQ ID NO: 90 - protein, 303 aa, Homo sapiens
MSRSNVQPTAAPGQKVMENSSGTPDILTRHFTIDDFEIGRPLGKGKFGNVYLAREKKSHFIVALKVLFKSQIEKEGVEHQLRREIEIQAHLHHPNILRLYNYFYDRRRIYLILEYAPRGELYKELQKSCTFDEQRTATIMEELADALMYCHGKKVIHRDIKPENLLLGLKGELKIADFGWSVHAPSLRRKTMCGTLDYLPPEMIEGRMHNEKVDLWCIGVLCYELLVGNPPFESASHNETYRRIVKVDLKFPASVPMGAQDLISKLLRHNPSERLPLAQVSAHPWVRANSRRVLPPSALQSVA

SEQ ID NO: 91 - protein, 736 aa, Homo sapiens
MSLSENSVFAYESSVHSTNVLLSLNDQRKKDVLCDVTIFVEGQRFRAHRSVLAACSSYFHSRIVGQADGELNITLPEEVTVKGFEPLIQFAYTAKLILSKENVDEVCKCVEFLSVHNIEESCFQFLKFKFLDSTADQQECPRKKCFSSHCQKTDLKLSLLDQRDLETDEVEEFLENKNVQTPQCKLRRYQGNAKASPPLQDSASQTYESMCLEKDAALALPSLCPKYRKFQKAFGTDRVRTGESSVKDIHASVQPNERSENECLGGVPECRDLQVMLKCDESKLAMEPEETKKDPASQCPTEKSEVTPFPHNSSIDPHGLYSLSLLHTYDQYGDLNFAGMQNTTVLTEKPLSGTDVQEKTFGESQDLPLKSDLGTREDSSVASSDRSSVEREVAEHLAKGFWSDICSTDTPCQMQLSPAVAKDGSEQISQKRSECPWLGIRISESPEPGQRTFTTLSSVNCPFISTLSTEGCSSNLEIGNDDYVSEPQQEPCPYACVISLGDDSETDTEGDSESCSAREQECEVKLPFNAQRIISLSRNDFQSLLKMHKLTPEQLDCIHDIRRRSKNRIAAQRCRKRKLDCIQNLESEIEKLQSEKESLLKERDHILSTLGETKQNLTGLCQKVCKEAALSQEQIQILAKYSAADCPLSFLISEKDKSTPDGELALPSIFSLSDRPPAVLPPCARGNSEPGYARGQESQQMSTATSEQAGPAEQCRQSGGISDFCQQMTDKCTTDE

SEQ ID NO: 92 - protein, 777 aa, Homo sapiens
MPDNRQPRNRQPRIRSGNEPRSAPAMEPDGRGAWAHSRAALDRLEKLLRCSRCTNILREPVCLGGCEHIFCSNCVSDCIGTGCPVCYTPAWIQDLKINRQLDSMIQLCSKLRNLLHDNELSDLKEDKPRKSLFNDAGNKKNSIKMWFSPRSKKVRYVVSKASVQTQPAIKKDASAQQDSYEFVSPSPPADVSERAKKASARSGKKQKKKTLAEINQKWNLEAEKEDGEFDSKEESKQKLVSFCSQPSVISSPQINGEIDLLASGSLTESECFGSLTEVSLPLAEQIESPDTKSRNEVVTPEKVCKNYLTSKKSLPLENNGKRGHHNRLSSPISKRCRTSILSTSGDFVKQTVPSENIPLPECSSPPSCKRKVGGTSGRKNSNMSDEFISLSPGTPPSTLSSSSYRRVMSSPSAMKLLPNMAVKRNHRGETLLHIASIKGDIPSVEYLLQNGSDPNVKDHAGWTPLHEACNHGHLKVVELLLQHKALVNTTGYQNDSPLHDAAKNGHVDIVKLLLSYGASRNAVNIFGLRPVDYTDDESMKSLLLLPEKNESSSASHCSVMNTGQRRDGPLVLIGSGLSSEQQKMLSELAVILKAKKYTEFDSTVTHVVVPGDAVQSTLKCMLGILNGCWILKFEWVKACLRRKVCEQEEKYEIPEGPRRSRLNREQLLPKLFDGCYFYLWGTFKHHPKDNLIKLVTAGGGQILSRKPKPDSDVTQTINTVAYHARPDSDQRFCTQYIIYEDLCNYHPERVRQGKVWKAPSSWFIDCVMSFELLPLDS

SEQ ID NO: 93 - protein, 322 aa, Homo sapiens
MASRSKRRAVESGVPQPPDPPVQRDEEEEKEVENEDEDDDDSDKEKDEEDEVIDEEVNIEFEAYSLSDNDYDGIKKLLQQLFLKAPVNTAELTDLLIQQNHIGSVIKQTDVSEDSNDDMDEDEVFGFISLLNLTERKGTQCVEQIQELVLRFCEKNCEKSMVEQLDKFLNDTTKPVGLLLSERFINVPPQIALPMYQQLQKELAGAHRTNKPCGKCYFYLLISKTFVEAGKNNSKKKPSNKKKAALMFANAEEEFFYEEQGKPEVLGGPDTRRGLEPVPIQHNGGSRGQVTALVSLKAGLIQSRSTLSDFQGTFMTVGIALS

SEQ ID NO: 94 - protein, 1417 aa, Homo sapiens
MAAVPQNNLQEQLERHSARTLNNKLSLSKPKFSGFTFKKKTSSDNNVSVTNVSVAKTPVLRNKDVNVTEDFSFSEPLPNTTNQQRVKDFFKNAPAGQETQRGGSKSLLPDFLQTPKEVVCTTQNTPTVKKSRDTALKKLEFSSSPDSLSTINDWDDMDDFDTSETSKSFVTPPQSHFVRVSTAQKSKKGKRNFFKAQLYTTNTVKTDLPPPSSESEQIDLTEEQKDDSEWLSSDVICIDDGPIAEVHINEDAQESDSLKTHLEDERDNSEKKKNLEEAELHSTEKVPCIEFDDDDYDTDFVPPSPEEIISASSSSSKCLSTLKDLDTSDRKEDVLSTSKDLLSKPEKMSMQELNPETSTDCDARQISLQQQLIHVMEHICKLIDTIPDDKLKLLDCGNELLQQRNIRRKLLTEVDFNKSDASLLGSLWRYRPDSLDGPMEGDSCPTGNSMKELNFSHLPSNSVSPGDCLLTTTLGKTGFSATRKNLFERPLFNTHLQKSFVSSNWAETPRLGKKNESSYFPGNVLTSTAVKDQNKHTASINDLERETQPSYDIDNFDIDDFDDDDDWEDIMHNLAASKSSTAAYQPIKEGRPIKSVSERLSSAKTDCLPVSSTAQNINFSESIQNYTDKSAQNLASRNLKHERFQSLSFPHTKEMMKIFHKKFGLHNFRTNQLEAINAALLGEDCFILMPTGGGKSLCYQLPACVSPGVTVVISPLRSLIVDQVQKLTSLDIPATYLTGDKTDSEATNIYLQLSKKDPIIKLLYVTPEKICASNRLISTLENLYERKLLARFVIDEAHCVSQWGHDFRQDYKRMNMLRQKFPSVPVMALTATANPRVQKDILTQLKILRPQVFSMSFNRHNLKYYVLPKKPKKVAFDCLEWIRKHHPYDSGIIYCLSRRECDTMADTLQRDGLAALAYHAGLSDSARDEVQQKWINQDGCQVICATIAFGMGIDKPDVRFVIHASLPKSVEGYYQESGRAGRDGEISHCLLFYTYHDVTRLKRLIMMEKDGNHHTRETHFNNLYSMVHYCENITECRRIQLLAYFGENGFNPDFCKKHPDVSCDNCCKTKDYKTRDVTDDVKSIVRFVQEHSSSQGMRNIKHVGPSGRFTMNMLVDIFLGSKSAKIQSGIFGKGSAYSRHNAERLFKKLILDKILDEDLYINANDQAIAYVMLGNKAQTVLNGNLKVDFMETENSSSVKKQKALVAKVSQREEMVKKCLGELTEVCKSLGKVFGVHYFNIFNTVTLKKLAESLSSDPEVLLQIDGVTEDKLEKYGAEVISVLQKYSEWTSPAEDSSPGISLSSSRGPGRSAAEELDEEIPVSSHYFASKTRNERKRKKMPASQRSKRRKTASSGSKAKGGSATCRKISSKTKSSSIIGSSSASHTSQATSGANSKLGIMAPPKPINRPFLKPSYAFS

SEQ ID NO: 95 - protein, 3418 aa, Homo sapiens
MPIGSKERPTFFEIFKTRCNKADLGPISLNWFEELSSEAPPYNSEPAEESEHKNNNYEPNLFKTPQRKPSYNQLASTPIIFKEQGLTLPLYQSPVKELDKFKLDLGRNVPNSRHKSLRTVKTKMDQADDVSCPLLNSCLSESPVVLQCTHVTPQRDKSVVCGSLFHTPKFVKGRQTPKHISESLGAEVDPDMSWSSSLATPPTLSSTVLIVRNEEASETVFPHDTTANVKSYFSNHDESLKKNDRFIASVTDSENTNQREAASHGFGKTSGNSFKVNSCKDHIGKSMPNVLEDEVYETVVDTSEEDSFSLCFSKCRTKNLQKVRTSKTRKKIFHEANADECEKSKNQVKEKYSFVSEVEPNDTDPLDSNVANQKPFESGSDKISKEVVPSLACEWSQLTLSGLNGAQMEKIPLLHISSCDQNISEKDLLDTENKRKKDFLTSENSLPRISSLPKSEKPLNEETVVNKRDEEQHLESHTDCILAVKQAISGTSPVASSFQGIKKSIFRIRESPKETFNASFSGHMTDPNFKKETEASESGLEIHTVCSQKEDSLCPNLIDNGSWPATTTQNSVALKNAGLISTLKKKTNKFIYAIHDETSYKGKKIPKDQKSELINCSAQFEANAFEAPLTFANADSGLLHSSVKRSCSQNDSEEPTLSLTSSFGTILRKCSRNETCSNNTVISQDLDYKEAKCNKEKLQLFITPEADSLSCLQEGQCENDPKSKKVSDIKEEVLAAACHPVQHSKVEYSDTDFQSQKSLLYDHENASTLILTPTSKDVLSNLVMISRGKESYKMSDKLKGNNYESDVELTKNIPMEKNQDVCALNENYKNVELLPPEKYMRVASPSRKVQFNQNTNLRVIQKNQEETTSISKITVNPDSEELFSDNENNFVFQVANERNNLALGNTKELHETDLTCVNEPIFKNSTMVLYGDTGDKQATQVSIKKDLVYVLAEENKNSVKQHIKMTLGQDLKSDISLNIDKIPEKNNDYMNKWAGLLGPISNHSFGGSFRTASNKEIKLSEHNIKKSKMFFKDIEEQYPTSLACVEIVNTLALDNQKKLSKPQSINTVSAHLQSSVVVSDCKNSHITPQMLFSKQDFNSNHNLTPSQKAEITELSTILEESGSQFEFTQFRKPSYILQKSTFEVPENQMTILKTTSEECRDADLHVIMNAPSIGQVDSSKQFEGTVEIKRKFAGLLKNDCNKSASGYLTDENEVGFRGFYSAHGTKLNVSTEALQKAVKLFSDIENISEETSAEVHPISLSSSKCHDSVVSMFKIENHNDKTVSEKNNKCQLILQNNIEMTTGTFVEEITENYKRNTENEDNKYTAASRNSHNLEFDGSDSSKNDTVCIHKDETDLLFTDQHNICLKLSGQFMKEGNTQIKEDLSDLTFLEVAKAQEACHGNTSNKEQLTATKTEQNIKDFETSDTFFQTASGKNISVAKESFNKIVNFFDQKPEELHNFSLNSELHSDIRKNKMDILSYEETDIVKHKILKESVPVGTGNQLVTFQGQPERDEKIKEPTLLGFHTASGKKVKIAKESLDKVKNLFDEKEQGTSEITSFSHQWAKTLKYREACKDLELACETIEITAAPKCKEMQNSLNNDKNLVSIETVVPPKLLSDNLCRQTENLKTSKSIFLKVKVHENVEKETAKSPATCYTNQSPYSVIENSALAFYTSCSRKTSVSQTSLLEAKKWLREGIFDGQPERINTADYVGNYLYENNSNSTIAENDKNHLSEKQDTYLSNSSMSNSYSYHSDEVYNDSGYLSKNKLDSGIEPVLKNVEDQKNTSFSKVISNVKDANAYPQTVNEDICVEELVTSSSPCKNKNAAIKLSISNSNNFEVGPPAFRIASGKIVCVSHETIKKVKDIFTDSFSKVIKENNENKSKICQTKIMAGCYEALDDSEDILHNSLDNDECSTHSHKVFADIQSEEILQHNQNMSGLEKVSKISPCDVSLETSDICKCSIGKLHKSVSSANTCGIFSTASGKSVQVSDASLQNARQVFSEIEDSTKQVFSKVLFKSNEHSDQLTREENTAIRTPEHLISQKGFSYNVVNSSAFSGFSTASGKQVSILESSLHKVKGVLEEFDLIRTEHSLHYSPTSRQNVSKILPRVDKRNPEHCVNSEMEKTCSKEFKLSNNLNVEGGSSENNHSIKVSPYLSQFQQDKQQLVLGTKVSLVENIHVLGKEQASPKNVKMEIGKTETFSDVPVKTNIEVCSTYSKDSENYFETEAVEIAKAFMEDDELTDSKLPSHATHSLFTCPENEEMVLSNSRIGKRRGEPLILVGEPSIKRNLLNEFDRIIENQEKSLKASKSTPDGTIKDRRLFMHHVSLEPITCVPFRTTKERQEIQNPNFTAPGQEFLSKSHLYEHLTLEKSSSNLAVSGHPFYQVSATRNEKMRHLITTGRPTKVFVPPFKTKSHFHRVEQCVRNINLEENRQKQNIDGHGSDDSKNKINDNEIHQFNKNNSNQAAAVTFTKCEEEPLDLITSLQNARDIQDMRIKKKQRQRVFPQPGSLYLAKTSTLPRISLKAAVGGQVPSACSHKQLYTYGVSKHCIKINSKNAESFQFHTEDYFGKESLWTGKGIQLADGGWLIPSNDGKAGKEEFYRALCDTPGVDPKLISRIWVYNHYRWIIWKLAAMECAFPKEFANRCLSPERVLLQLKYRYDTEIDRSRRSAIKKIMERDDTAAKTLVLCVSDIISLSANISETSSNKTSSADTQKVAIIELTDGWYAVKAQLDPPLLAVLKNGRLTVGQKIILHGAELVGSPDACTPLEAPESLMLKISANSTRPARWYTKLGFFPDPRPFPLPLSSLFSDGGNVGCVDVIIQRAYPIQWMEKTSSGLYIFRNEREEEKEAAKYVEAQQKRLEALFTKIQEEFEEHEENTTKPYLPSRALTRQQVRALQDGAELYEAVKNAADPAYLEGYFSEEQLRALNNHRQMLNDKKQAQIQLEIRKAMESAEQKEQGLSRDVTTVWKLRIVSYSKKEKDSVILSIWRPSSDLYSLLTEGKRYRIYHLATSKSKSKSERANIQLAATKKTQYQQLPVSDEILFQIYQPREPLHFSKFLDPDFQPSCSEVDLIGFVVSVVKKTGLAPFVYLSDECYNLLAIKFWIDLNEDIIKPHMLIAASNLQWRPESKSGLLTLFAGDFSVFSASPKEGHFQETFNKMKNTVENIDILCNEAENKLMHILHANDPKWSTPTKDCTSGPYTAQIIPGTGNKLLMSSPNCEIYYQSPLSLCMAKRKSVSTPVSAQMTSKSCKGEKEIDDQKNCKKRRALDFLSRLPLPPPVSPICTFVSPAAQKAFQPPRSCGTKYETPIKKKELNSPQMTPFKKFNEISLLESNSIADEELALINTQALLSGSTGEKQFISVSESTRTAPTSSEDYLRLKRRCTTSLIKEQESSQASTEECEKNKQDTITTKKYI

SEQ ID NO: 96 - protein, 291 aa, Homo sapiens
MAVQVVQAVQAVHLESDAFLVCLNHALSTEKEEVMGLCIGELNDDTRSDSKFAYTGTEMRTVAEKVDAVRIVHIHSVIILRRSDKRKDRVEISPEQLSAASTEAERLAELTGRPMRVVGWYHSHPHITVWPSHVDVRTQAMYQMMDQGFVGLIFSCFIEDKNTKTGRVLYTCFQSIQAQKSSEYERIEIPIHIVPHVTIGKVCLESAVELPKILCQEEQDAYRRIHSLTHLDSVTKIHNGSVFTKNLCSQMSAVSGPLLQWLEDRLEQNQQHLQELQQEKEELMQELSSLE

SEQ ID NO: 97 - protein, 379 aa, Homo sapiens
MSPEVALNRISPMLSPFISSVVRNGKVGLDATNCLRITDLKSGCTSLTPGPNCDRFKLHIPYAGETLKWDIIFNAQYPELPPDFIFGEDAEFLPDPSALQNLASWNPSNPECLLLVVKELVQQYHQFQCSRLRESSRLMFEYQTLLEEPQYGENMEIYAGKKNNWTGEFSARFLLKLPVDFSNIPTYLLKDVNEDPGEDVALLSVSFEDTEATQVYPKLYLSPRIEHALGGSSALHIPAFPGGGCLIDYVPQVCHLLTNKVQYVIQGYHKRREYIAAFLSHFGTGVVEYDAEGFTKLTLLLMWKDFCFLVHIDLPLFFPRDQPTLTFQSVYHFTNSGQLYSQAQKNYPYSPRWDGNEMAKRANSRRQHLPMESSRKHQS

SEQ ID NO: 98 - protein, 1050 aa, Homo sapiens
MAAVKKEGGALSEAMSLEGDEWELSKENVQPLRQGRIMSTLQGALAQESACNNTLQQQKRAFEYEIRFYTGNDPLDVWDRYISWTEQNYPQGGKESNMSTLLERAVEALQGEKRYYSDPRFLNLWLKLGRLCNEPLDMYSYLHNQGIGVSLAQFYISWAEEYEARENFRKADAIFQEGIQQKAEPLERLQSQHRQFQARVSRQTLLALEKEEEEEVFESSVPQRSTLAELKSKGKKTARAPIIRVGGALKAPSQNRGLQNPFPQQMQNNSRITVFDENADEASTAELSKPTVQPWIAPPMPRAKENELQAGPWNTGRSLEHRPRGNTASLIAVPAVLPSFTPYVEETAQQPVMTPCKIEPSINHILSTRKPGKEEGDPLQRVQSHQQASEEKKEKMMYCKEKIYAGVGEFSFEEIRAEVFRKKLKEQREAELLTSAEKRAEMQKQIEEMEKKLKEIQTTQQERTGDQQEETMPTKETTKLQIASESQKIPGMTLSSSVCQVNCCARETSLAENIWQEQPHSKGPSVPFSIFDEFLLSEKKNKSPPADPPRVLAQRRPLAVLKTSESITSNEDVSPDVCDEFTGIEPLSEDAIITGFRNVTICPNPEDTCDFARAARFVSTPFHEIMSLKDLPSDPERLLPEEDLDVKTSEDQQTACGTIYSQTLSIKKLSPIIEDSREATHSSGFSGSSASVASTSSIKCLQIPEKLELTNETSENPTQSPWCSQYRRQLLKSLPELSASAELCIEDRPMPKLEIEKEIELGNEDYCIKREYLICEDYKLFWVAPRNSAELTVIKVSSQPVPWDFYINLKLKERLNEDFDHFCSCYQYQDGCIVWHQYINCFTLQDLLQHSEYITHEITVLIIYNLLTIVEMLHKAEIVHGDLSPRCLILRNRIHDPYDCNKNNQALKIVDFSYSVDLRVQLDVFTLSGFRTVQILEGQKILANCSSPYQVDLFGIADLAHLLLFKEHLQVFWDGSFWKLSQNISELKDGELWNKFFVRILNANDEATVSVLGELAAEMNGVFDTTFQSHLNKALWKVGKLTSPGALLFQ

SEQ ID NO: 99 - protein, 1322 aa, Homo sapiens
MPVVWPTLLDLSRDECKRILRKLELEAYAGVISALRAQGDLTKEKKDLLGELSKVLSISTERHRAEVRRAVNDERLTTIAHNMSGPNSSSEWSIEGRRLVPLMPRLVPQTAFTVTANAVANAAIQHNASLPVPAETGSKEVVCYSYTSTTSTPTSTPVPSGSIATVKSPRPASPASNVVVLPSGSTVYVKSVSCSDEDEKPRKRRRTNSSSSSPVVLKEVPKAVVPVSKTITVPVSGSPKMSNIMQSIANSLPPHMSPVKITFTKPSTQTTNTTTQKVIIVTTSPSSTFVPNILSKSHNYAAVTKLVPTSVIASTTQKPPVVITASQSSLVSNSSSGSSSSTPSPIPNTVAVTAVVSSTPSVVMSTVAQGVSTSAIKMASTRLPSPKSLVSAPTQILAQFPKQHQQSPKQQLYQVQQQTQQQVAQPSPVSHQQQPQQSPLPPGIKPTIQIKQESGVKIITQQVQPSKILPKPVTATLPTSSNSPIMVVSSNGAIMTTKLVTTPTGTQATYTRPTVSPSIGRMAATPGAATYVKTTSGSIITVVPKSLATLGGKIISSNIVSGTTTKITTIPMTSKPNVIVVQKTTGKGTTIQGLPGKNVVTTLLNAGGEKTIQTVPTGAKPAILTATRPITKMIVTQPKGIGSTVQPAAKIIPTKIVYGQQGKTQVLIKPKPVTFQATVVSEQTRQLVTETLQQASRVAEAGNSSIQEGKEEPQNYTDSSSSSTESSQSSQDSQPVVHVIASRRQDWSEHEIAMETSPTIIYQDVSSESQSATSTIKALLELQQTTVKEKLESKPRQPTIDLSQMAVPIQMTQEKRHSPESPSIAVVESELVAEYITTERTDEGTEVAFPLLVSHRSQPQQPSQPQRTLLQHVAQSQTATQTSVVVKSIPASSPGAITHIMQQALSSHTAFTKHSEELGTEEGEVEEMDTLDPQTGLFYRSALTQSQSAKQQKLSQPPLEQTQLQVKTLQCFQTKQKQTIHLQADQLQHKLPQMPQLSIRHQKLTPLQQEQAQPKPDVQHTQHPMVAKDRQLPTLMAQPPQTVVQVLAVKTTQQLPKLQQAPNQPKIYVQPQTPQSQMSLPASSEKQTASQVEQPIITQGSSVTKITFEGRQPPTVTKITGGSSVPKLTSPVTSISPIQASEKTAVSDILKMSLMEAQIDTNVEHMIVDPPKKALATSMLTGEAGSLPSTHMVVAGMANSTPQQQKCRESCSSPSTVGSSLTTRKIDPPAVPATGQFMRIQNVGQKKAEESPAEIIIQAIPQYAIPCHSSSNVVVEPSGLLELNNFTSQQLDDEETAMEQDIDSSTEDGTEPSPSQSSAERS

SEQ ID NO: 100 - protein, 432 aa, Homo sapiens
MLGNSAPGPATREAGSALLALQQTALQEDQENINPEKAAPVQQPRTRAALAVLKSGNPRGLAQQQRPKTRRVAPLKDLPVNDEHVTVPPWKANSKQPAFTIHVDEAEKEAQKKPAESQKIEREDALAFNSAISLPGPRKPLVPLDYPMDGSFESPHTMDMSIVLEDEKPVSVNEVPDYHEDIHTYLREMEVKCKPKVGYMKKQPDITNSMRAILVDWLVEVGEEYKLQNETLHLAVNYIDRFLSSMSVLRGKLQLVGTAAMLLASKFEEIYPPEVAEFVYITDDTYTKKQVLRMEHLVLKVLTFDLAAPTVNQFLTQYFLHQQPANCKVESLAMFLGELSLIDADPYLKYLPSVIAGAAFHLALYTVTGQSWPESLIRKTGYTLESLKPCLMDLHQTYLKAPQHAQQSIREKYKNSKYHGVSLLNPPETLNL

SEQ ID NO: 101 - protein, 598 aa, Homo sapiens
MFVSDFRKEFYEVVQSQRVLLFVASDVDALCACKILQALFQCDHVQYTLVPVSGWQELETAFLEHKEQFHYFILINCGANVDLLDILQPDEDTIFFVCDTHRPVNVVNVYNDTQIKLLIKQDDDLEVPAYEDIFRDEEEDEEHSGNDSDGSEPSEKRTRLEEEIVEQTMRRRQRREWEARSGSGSEPVAAALEKSSRLFAGPMSDRTAPRSPRRDILFDYEQYEYHGTSSAMVMFELAWMLSKDLNDMLWWAIVGLTDQWVQDKITQMKYVTDVGVLQRHVSRHNHRNEDEENTLSVDCTRISFEYDLRLVLYQHWSLHDSLCNTSYTAARFKLWSVHGQKRLQEFLADMGLPLKQVKQKFQAMDISLKENLREMIEESANKFGMKDMRVQTFSIHFGFKHKFLASDVVFATMSLMESPEKDGSGTDHFIQALDSLSRSNLDKLYHGLELAKKQLRATQQTIASCLCTNLVISQGPFLYCSLMEGTPDVMLFSRPASLSLLSKHLLKSFVCSTKNRRCKLLPLVMAAPLSMEHGTVTVVGIPPETDSSDRKNFFGRAFEKAAESTSSRMLHNHFDLSVIELKAEDRSKFLDALISLLS

SEQ ID NO: 102 - protein, 109 aa, Homo sapiens
MEDYTKIEKIGEGTYGVVYKGRHKTTGQVVAMKKIRLESEEEGVPSTAIREISLLKELRHPNIVSLQDVLMQDSRLYLIFEFLSMDLKKYLDSIPPGQYMDSSLVKVKA

SEQ ID NO: 103 - protein, 238 aa, Homo sapiens
MENFQKVEKIGEGTYGVVYKARNKLTGEVVALKKIRLDTLLDVIHTENKLYLVFEFLHQDLKKFMDASALTGIPLPLIKSYLFQLLQGLAFCHSHRVLHRDLKPQNLLINTEGAIKLADFGLARAFGVPVRTYTHEVTRRALFPGDSEIDQLFRIFRTLGTPDEVVWPGVTSMPDYKPSFPKWARQDFSKVVPPLDEDGRSLLSQMLHYDPNKRISAKAALAHPFFQDVTKPVPHLRL

SEQ ID NO: 104 - protein, 303 aa, Homo sapiens
MATSRYEPVAEIGVGAYGTVYKARDPHSGHFVALKSVRVPNGGGGGGGLPISTVREVALLRRLEAFEHPNVVRLMDVCATSRTDREIKVTLVFEHVDQDLRTYLDKAPPPGLPAETIKDLMRQFLRGLDFLHANCIVHRDLKPENILVTSGGTVKLADFGLARIYSYQMALTPVVVTLWYRAPEVLLQSTYATPVDMWSVGCIFAEMFRRKPLFCGNSEADQLGKIFDLIGLPPEDDWPRDVSLPRGAFPPRGPRPVQSVVPEMEESGAQLLLEMLTFNPHKRISAFRALQHSYLHKDEGNPE

SEQ ID NO: 105 - protein, 476 aa, Homo sapiens
MAVPFVEDWDLVQTLGEGAYGEVQLAVNRVTEEAVAVKIVDMKRAVDCPENIKKEICINKMLNHENVVKFYGHRREGNIQYLFLEYCSGGELFDRIEPDIGMPEPDAQRFFHQLMAGVVYLHGIGITHRDIKPENLLLDERDNLKISDFGLATVFRYNNRERLLNKMCGTLPYVAPELLKRREFHAEPVDVWSCGIVLTAMLAGELPWDQPSDSCQEYSDWKEKKTYLNPWKKIDSAPLALLHKILVENPSARITIPDIKKDRWYNKPLKKGAKRPRVTSGGVSESPSGFSKHIQSNLDFSPVNSASSEENVKYSSSQPEPRTGLSLWDTSPSYIDKLVQGISFSQPTCPDHMLLNSQLLGTPGSSQNPWQRLVKRMTRFFTKLDADKSYQCLKETCEKLGYQWKKSCMNQVTISTTDRRNNKLIFKVNLLEMDDKILVDFRLSKGDGLEFKRHFLKIKGKLIDIVSSQKIWLPAT

SEQ ID NO: 106 - protein, 586 aa, Homo sapiens
MSRESDVEAQQSHGSSACSQPHGSVTQSQGSSSQSQGISSSSTSTMPNSSQSSHSSSGTLSSLETVSTQELYSIPEDQEPEDQEPEEPTPAPWARLWALQDGFANLETESGHVTQSDLELLLSSDPPASASQSAGIRGVRHHPRPVCSLKCVNDNYWFGRDKSCEYCFDEPLLKRTDKYRTYSKKHFRIFREVGPKNSYIAYIEDHSGNGTFVNTELVGKGKRRPLNNNSEIALSLSRNKVFVFFDLTVDDQSVYPKALRDEYIMSKTLGSGACGEVKLAFERKTCKKVAIKIISKRKFAIGSAREADPALNVETEIEILKKLNHPCIIKIKNFFDAEDYYIVLELMEGGELFDKVVGNKRLKEATCKLYFYQMLLAVQYLHENGIIHRDLKPENVLLSSQEEDCLIKITDFGHSKILGETSLMRTLCGTPTYLAPEVLVSVGTAGYNRAVDCWSLGVILFICLSGYPPFSEHRTQVSLKDQITSGKYNFIPEVWAEVSEKALDLVKKLLVVDPKARFTTEEALRHPWLQDEDMKRKFQDLLSEENESTALPQVLAQPSTSRKRPREGEAEGAETTKRPAVCAAVL

SEQ ID NO: 107 - protein, 285 aa, Homo sapiens
MKEDQVVAEEPGFQDEEESLFQDIDLLQKHGINVADIKKLKSVGICTIKGIQMTTRRALCNVKGLSEAKVDKIKEAANKLIEPGFLTAFEYSEKRKMVFHITTGSQEFDKLLGGGIESMAITEAFGEFRTGKTQLSHTLCGEHQMELLDYVAAKFHEEAGIFKLLIIDSIMALFRVDFSGRGELAERQQKLAQMLSRLQKISEEYNVAVFVTNQMTADPGATMTFQADPKKPIGGHILAHASTTRISLRKGRGELRIAKIYDSPEMPENEATFAITAGGIGDAKE

SEQ ID NO: 108 - protein, 677 aa, Homo sapiens
MEETMKLATMEDTVEYCLFLIPDESRDSDKHKEILQKYIERIITRFAPMLVPYIWQNQPFNLKYKPGKGGVPAHMFGVTKFGDNIEDEWFIVYVIKQITKEFPELVARIEDNDGEFLLIEAADFLPKWLDPENSTNRVFFCHGELCIIPAPRKSGAESWLPTTPPTIPQALNIITAHSEKILASESIRAAVNRRIRGYPEKIQASLHRAHCFLPAGIVAVLKQRPRLVAAAVQAFYLRDPIDLRACRVFKTFLPETRIMTSVTFTKCLYAQLVQQRFVPDRRSGYRLPPPSDPQYRAHELGMKLAHGFEILCSKCSPHFSDCKKSLVTASPLWASFLESLKKNDYFKGLIEGSAQYRERLEMAENYFQLSVDWPERLEVQWRDPGLLQAPPPGFTPFICLSLLSTWDNSSLAMSPGEEILTLLQTIPFDIEDLKKEAANLPPEDDDQWLDLSPDQLDQLLQEAVGKKESESVSKEEKEQNYDLTEVSESMKAFISKVSTHKGAELPREPSEAPITFDADSFLNYFDKILGPRPNESDSDDLDDEDFECLDSDDDLDFETHEPGEEASLKGTLDNLKSYMAQMDQELAHTCISKSFTTRNQVEPVSQTTDNNSDEEDSGTGESVMAPVDVDLNLVSNILESYSSQAGLAGPASNLLQSMGVQLPDNTDHRPTSKPTKN

SEQ ID NO: 109 - protein, 1451 aa, Homo sapiens
MVSKRRLSKSEDKESLTEDASKTRKQPLSKKTKKSHIANEVEENDSIFVKLLKISGIILKTGESQNQLAVDQIAFQKKLFQTLRRHPSYPKIIEEFVSGLESYIEDEDSFRNCLLSCERLQDEEASMGASYSKSLIKLLLGIDILQPAIIKTLFEKLPEYFFENKNSDEINIPRLIVSQLKWLDRVVDGKDLTTKIMQLISIAPENLQHDIITSLPEILGDSQHADVGKELSDLLIENTSLTVPILDVLSSLRLDPNFLLKVRQLVMDKLSSIRLEDLPVIIKFILHSVTAMDTLEVISELREKLDLQHCVLPSRLQASQVKLKSKGRASSSGNQESSGQSCIILLFDVIKSAIRYEKTISEAWIKAIENTASVSEHKVFDLVMLFIIYSTNTQTKKYIDRVLRNKIRSGCIQEQLLQSTFSVHYLVLKDMCSSILSLAQSLLHSLDQSIISFGSLLYKYAFKFFDTYCQQEVVGALVTHICSGNEAEVDTALDVLLELVVLNPSAMMMNAVFVKGILDYLDNISPQQIRKLFYVLSTLAFSKQNEASSHIQDDMHLVIRKQLSSTVFKYKLIGIIGAVTMAGIMAADRSESPSLTQERANLSDEQCTQVTSLLQLVHSCSEQSPQASALYYDEFANLIQHEKLDPKALEWVGHTICNDFQDAFVVDSCVVPEGDFPFPVKALYGLEEYDTQDGIAINLLPLLFSQDFAKDGGPVTSQESGQKLVSPLCLAPYFRLLRLCVERQHNGNLEEIDGLLDCPIFLTDLEPGEKLESMSAKERSFMCSLIFLTLNWFREIVNAFCQETSPEMKGKVLTRLKHIVELQIILEKYLAVTPDYVPPLGNFDVETLDITPHTVTAISAKIRKKGKIERKQKTDGSKTSSSDTLSEEKNSECDPTPSHRGQLNKEFTGKEEKTSLLLHNSHAFFRELDIEVFSILHCGLVTKFILDTEMHTEATEVVQLGPPELLFLLEDLSQKLESMLTPPIARRVPFLKNKGSRNIGFSHLQQRSAQEIVHCVFQLLTPMCNHLENIHNYFQCLAAENHGVVDGPGVKVQEYHIMSSCYQRLLQIFHGLFAWSGFSQPENQNLLYSALHVLSSRLKQGEHSQPLEELLSQSVHYLQNFHQSIPSFQCALYLIRLLMVILEKSTASAQNKEKIASLARQFLCRVWPSGDKEKSNISNDQLHALLCIYLEHTESILKAIEEIAGVGVPELINSPKDASSSTFPTLTRHTFVVFFRVMMAELEKTVKKIEPGTAADSQQIHEEKLLYWNMAVRDFSILINLIKVFDSHPVLHVCLKYGRLFVEAFLKQCMPLLDFSFRKHREDVLSLLETFQLDTRLLHHLCGHSKIHQDTRLTQHVPLLKKTLELLVCRVKAMLTLNNCREAFWLGNLKNRDLQGEEIKSQNSQESTADESEDDMSSQASKSKATEDGEEDEVSAGEKEQDSDESYDDSD

SEQ ID NO: 110 - protein, 536 aa, Homo sapiens
MATPDAGLPGAEGVEPAPWAQLEAPARLLLQALQAGPEGARRGLGVLRALGSRGWEPFDWGRLLEALCREEPVVQGPDGRLELKPLLLRLPRICQRNLMSLLMAVRPSLPESGLLSVLQIAQQDLAPDPDAWLRALGELLRRDLGVGTSMEGASPLSERCQRQLQSLCRGLGLGGRRLKSPQAPDPEEEENRDSQQPGKRRKDSEEEAASPEGKRVPKRLRCWEEEEDHEKERPEHKSLESLADGGSASPIKDQPVMAVKTGEDGSNLDDAKGLAESLELPKAIQDQLPRLQQLLKTLEEGLEGLEDAPPVELQLLHECSPSQMDLLCAQLQLPQLSDLGLLRLCTWLLALSPDLSLSNATVLTRSLFLGRILSLTSSASRLLTTALTSFCAKYTYPVCSALLDPVLQAPGTGPAQTELLCCLVKMESLEPDAQVLMLGQILELPWKEETFLVLQSLLERQVEMTPEKFSVLMEKLCKKGLAATTSMAYAKLMLTVMTKYQANITETQRLGLAMALEPNTTFLRKSLKAALKHLGP

SEQ ID NO: 111 - protein, 622 aa, Homo sapiens
MSRQTTSVGSSCLDLWREKNDRLVRQAKVAQNSGLTLRRQQLAQDALEGLRGLLHSLQGLPAAVPVLPLELTVTCNFIILRASLAQGFTEDQAQDIQRSLERVLETQEQQGPRLEQGLRELWDSVLRASCLLPELLSALHRLVGLQAALWLSADRLGDLALLLETLNGSQSGASKDLLLLLKTWSPPAEELDAPLTLQDAQGLKDVLLTAFAYRQGLQELITGNPDKALSSLHEAASGLCPRPVLVQVYTALGSCHRKMGNPQRALLYLVAALKEGSAWGPPLLEASRLYQQLGDTTAELESLELLVEALNVPCSSKAPQFLIEVELLLPPPDLASPLHCGTQSQTKHILASRCLQTGRAGDAAEHYLDLLALLLDSSEPRFSPPPSPPGPCMPEVFLEAAVALIQAGRAQDALTLCEELLSRTSSLLPKMSRLWEDARKGTKELPYCPLWVSATHLLQGQAWVQLGAQKVAISEFSRCLELLFRATPEEKEQGAAFNCEQGCKSDAALQQLRAAALISRGLEWVASGQDTKALQDFLLSVQMCPGNRDTYFHLLQTLKRLDRRDEATALWWRLEAQTKGSHEDALWSLPLYLESYLSWIRPSDRDAFLEEFRTSLPKSCDL

SEQ ID NO: 112 - protein, 1328 aa, Homo sapiens
MDQKILSLAAEKTADKLQEFLQTLREGDLTNLLQNQAVKGKVAGALLRAIFKGSPCSEEAGTLRRRKIYTCCIQLVESGDLQKEIASEIIGLLMLEAHHFPGPLLVELANEFISAVREGSLVNGKSLELLPIILTALATKKENLAYGKGVLSGEECKKQLINTLCSGRWDQQYVIQLTSMFKDVPLTAEEVEFVVEKALSMFSKMNLQEIPPLVYQLLVLSSKGSRKSVLEGIIAFFSALDKQHNEEQSGDELLDVVTVPSGELRHVEGTIILHIVFAIKLDYELGRELVKHLKVGQQGDSNNNLSPFSIALLLSVTRIQRFQDQVLDLLKTSVVKSFKDLQLLQGSKFLQNLVPHRSYVSTMILEVVKNSVHSWDHVTQGLVELGFILMDSYGPKKVLDGKTIETSPSLSRMPNQHACKLGANILLETFKIHEMIRQEILEQVLNRVVTRASSPISHFLDLLSNIVMYAPLVLQSCSSKVTEAFDYLSFLPLQTVQRLLKAVQPLLKVSMSMRDCLILVLRKAMFANQLDARKSAVAGFLLLLKNFKVLGSLSSSQCSQSLSVSQVHVDVHSHYNSVANETFCLEIMDSLRRCLSQQADVRLMLYEGFYDVLRRNSQLANSVMQTLLSQLKQFYEPKPDLLPPLKLEACILTQGDKISLQEPLDYLLCCIQHCLAWYKNTVIPLQQGEEEEEEEEAFYEDLDDILESITNRMIKSELEDFELDKSADFSQSTSIGIKNNICAFLVMGVCEVLIEYNFSISSFSKNRFEDILSLFMCYKKLSDILNEKAGKAKTKMANKTSDSLLSMKFVSSLLTALFRDSIQSHQESLSVLRSSNEFMRYAVNVALQKVQQLKETGHVSGPDGQNPEKIFQNLCDITRVLLWRYTSIPTSVEESGKKEKGKSISLLCLEGLQKIFSAVQQFYQPKIQQFLRALDVTDKEGEEREDADVSVTQRTAFQIRQFQRSLLNLLSSQEEDFNSKEALLLVTVLTSLSKLLEPSSPQFVQMLSWTSKICKENSREDALFCKSLMNLLFSLHVSYKSPVILLRDLSQDIHGHLGDIDQDVEVEKTNHFAIVNLRTAAPTVCLLVLSQAEKVLEEVDWLITKLKGQVSQETLSEEASSQATLPNQPVEKAIIMQLGTLLTFFHELVQTALPSGSCVDTLLKDLCKMYTTLTALVRYYLQVCQSSGGIPKNMEKLVKLSGSHLTPLCYSFISYVQNKSKSLNYTGEKKEKPAAVATAMARVLRETKPIPNLIFAIEQYEKFLIHLSKKSKVNLMQHMKLSTSRDFKIKGNILDMVLREDGEDENEEGTASEHGGQNKEPAKKKRKK

SEQ ID NO: 113 - protein, 2647 aa, Homo sapiens
MSSSHSRAGQSAAGAAPGGGVDTRDAEMPATEKDLAEDAPWKKIQQNTFTRWCNEHLKCVSKRIANLQTDLSDGLRLIALLEVLSQKKMHRKHNQRPTFRQMQLENVSVALEFLDRESIKLVSIDSKAIVDGNLKLILGLIWTLILHYSISMPMWDEEEDEEAKKQTPKQRLLGWIQNKLPQLPITNFSRDWQSGRALGALVDSCAPGLCPDWDSWDASKPVTNAREAMQQADDWLGIPQVITPEEIVDPNVDEHSVMTYLSQFPKAKLKPGAPLRPKLNPKKARAYGPGIEPTGNMVKKRAEFTVETRSAGQGEVLVYVEDPAGHQEEAKVTANNDKNRTFSVWYVPEVTGTHKVTVLFAGQHIAKSPFEVYVDKSQGDASKVTAQGPGLEPSGNIANKTTYFEIFTAGAGTGEVEVVIQDPMGQKGTVEPQLEARGDSTYRCSYQPTMEGVHTVHVTFAGVPIPRSPYTVTVGQACNPSACRAVGRGLQPKGVRVKETADFKVYTKGAGSGELKVTVKGPKGEERVKQKDLGDGVYGFEYYPMVPGTYIVTITWGGQNIGRSPFEVKVGTECGNQKVRAWGPGLEGGVVGKSADFVVEAIGDDVGTLGFSVEGPSQAKIECDDKGDGSCDVRYWPQEAGEYAVHVLCNSEDIRLSPFMADIRDAPQDFHPDRVKARGPGLEKTGVAVNKPAEFTVDAKHGGKAPLRVQVQDNEGCPVEALVKDNGNGTYSCSYVPRKPVKHTAMVSWGGVSIPNSPFRVNVGAGSHPNKVKVYGPGVAKTGLKAHEPTYFTVDCAEAGQGDVSIGIKCAPGVVGPAEADIDFDIIRNDNDTFTVKYTPRGAGSYTIMVLFADQATPTSPIRVKVEPSHDASKVKAEGPGLSRTGVELGKPTHFTVNAKAAGKGKLDVQFSGLTKGDAVRDVDIIDHHDNTYTVKYTPVQQGPVGVNVTYGGDPIPKSPFSVAVSPSLDLSKIKVSGLGEKVDVGKDQEFTVKSKGAGGQGKVASKIVGPSGAAVPCKVEPGLGADNSVVRFLPREEGPYEVEVTYDGVPVPGSPFPLEAVAPTKPSKVKAFGPGLQGGSAGSPARFTIDTKGAGTGGLGLTVEGPCEAQLECLDNGDGTCSVSYVPTEPGDYNINILFADTHIPGSPFKAHVVPCFDASKVKCSGPGLERATAGEVGQFQVDCSSAGSAELTIEICSEAGLPAEVYIQDHGDGTHTITYIPLCPGAYTVTIKYGGQPVPNFPSKLQVEPAVDTSGVQCYGPGIEGQGVFREATTEFSVDARALTQTGGPHVKARVANPSGNLTETYVQDRGDGMYKVEYTPYEEGLHSVDVTYDGSPVPSSPFQVPVTEGCDPSRVRVHGPGIQSGTTNKPNKFTVETRGAGTGGLGLAVEGPSEAKMSCMDNKDGSCSVEYIPYEAGTYSLNVTYGGHQVPGSPFKVPVHDVTDASKVKCSGPGLSPGMVRANLPQSFQVDTSKAGVAPLQVKVQGPKGLVEPVDVVDNADGTQTVNYVPSREGPYSISVLYGDEEVPRSPFKVKVLPTHDASKVKASGPGLNTTGVPASLPVEFTIDAKDAGEGLLAVQITDPEGKPKKTHIQDNHDGTYTVAYVPDVTGRYTILIKYGGDEIPFSPYRVRAVPTGDASKCTVTVSIGGHGLGAGIGPTIQIGEETVITVDTKAAGKGKVTCTVCTPDGSEVDVDVVENEDGTFDIFYTAPQPGKYVICVRFGGEHVPNSPFQVTALAGDQPSVQPPLRSQQLAPQYTYAQGGQQTWAPERPLVGVNGLDVTSLRPFDLVIPFTIKKGEITGEVRMPSGKVAQPTITDNKDGTVTVRYAPSEAGLHEMDIRYDNMHIPGSPLQFYVDYVNCGHVTAYGPGLTHGVVNKPATFTVNTKDAGEGGLSLAIEGPSKAEISCTDNQDGTCSVSYLPVLPGDYSILVKYNEQHVPGSPFTARVTGDDSMRMSHLKVGSAADIPINISETDLSLLTATVVPPSGREEPCLLKRLRNGHVGISFVPKETGEHLVHVKKNGQHVASSPIPVVISQSEIGDASRVRVSGQGLHEGHTFEPAEFIIDTRDAGYGGLSLSIEGPSKVDINTEDLEDGTCRVTYCPTEPGNYIINIKFADQHVPGSPFSVKVTGEGRVKESITRRRRAPSVANVGSHCDLSLKIPEISIQDMTAQVTSPSGKTHEAEIVEGENHTYCIRFVPAEMGTHTVSVKYKGQHVPGSPFQFTVGPLGEGGAHKVRAGGPGLERAEAGVPAEFSIWTREAGAGGLAIAVEGPSKAEISFEDRKDGSCGVAYVVQEPGDYEVSVKFNEEHIPDSPFVVPVASPSGDARRLTVSSLQESGLKVNQPASFAVSLNGAKGAIDAKVHSPSGALEECYVTEIDQDKYAVRFIPRENGVYLIDVKFNGTHIPGSPFKIRVGEPGHGGDPGLVSAYGAGLEGGVTGNPAEFVVNTSNAGAGALSVTIDGPSKVKMDCQECPEGYRVTYTPMAPGSYLISIKYGGPYHIGGSPFKAKVTGPRLVSNHSLHETSSVFVDSLTKATCAPQHGAPGPGPADASKVVAKGLGLSKAYVGQKSSFTVDCSKAGNNMLLVGVHGPRTPCEEILVKHVGSRLYSVSYLLKDKGEYTLVVKWGDEHIPGSPYRVVVP

SEQ ID NO: 114 - protein, 537 aa, Homo sapiens
MGCVQCKDKEATKLTEERDGSLNQSSGYRYGTDPTPQHYPSFGVTSIPNYNNFHAAGGQGLTVFGGVNSSSHTGTLRTRGGTGVTLFVALYDYEARTEDDLSFHKGEKFQILNSSEGDWWEARSLTTGETGYIPSNYVAPVDSIQAEEWYFGKLGRKDAERQLLSFGNPRGTFLIRESETTKGAYSLSIRDWDDMKGDHVKHYKIRKLDNGGYYITTRAQFETLQQLVQHYSERAAGLCCRLVVPCHKGMPRLTDLSVKTKDVWEIPRESLQLIKRLGNGQFGEVWMGTWNGNTKVAIKTLKPGTMSPESFLEEAQIMKKLKHDKLVQLYAVVSEEPIYIVTEYMNKGSLLDFLKDGEGRALKLPNLVDMAAQVAAGMAYIERMNYIHRDLRSANILVGNGLICKIADFGLARLIEDNEYTARQGAKFPIKWTAPEAALYGRFTIKSDVWSFGILLTELVTKGRVPYPGMNNREVLEQVERGYRMPCPQDCPISLHELMIHCWKKDPEERPTFEYLQSFLEDYFTATEPQYQPGENL

SEQ ID NO: 115 - protein, 217 aa, Homo sapiens [sequence omitted]

SEQ ID NO: 116 - protein, 143 aa, Homo sapiens
MSGRGKTGGKARAKAKSRSSRAGLQFPVGRVHRLLRKGHYAERVGAGAPVYLAAVLEYLTAEILELAGNAARDNKKTRIIPRHLQLAIRNDEELNKLLGGVTIAQGGVLPNIQAVLLPKKTSATVGPKAPSGGKKATQASQEY

SEQ ID NO: 117 - protein, 482 aa, Homo sapiens
MAQTQGTRRKVCYYYDGDVGNYYYGQGHPMKPHRIRMTHNLLLNYGLYRKMEIYRPHKANAEEMTKYHSDDYIKFLRSIRPDNMSEYSKQMQRFNVGEDCPVFDGLFEFCQLSTGGSVASAVKLNKQQTDIAVNWAGGLHHAKKSEASGFCYVNDIVLAILELLKYHQRVLYIDIDIHHGDGVEEAFYTTDRVMTVSFHKYGEYFPGTGDLRDIGAGKGKYYAVNYPLRDGIDDESYEAIFKPVMSKVMEMFQPSAVVLQCGSDSLSGDRLGCFNLTIKGHAKCVEFVKSFNLPMLMLGGGGYTIRNVARCWTYETAVALDTEIPNELPYNDYFEYFGPDFKLHISPSNMTNQNTNEYLEKIKQRLFENLRMLPHAPGVQMQAIPEDAIPEESGDEDEDDPDKRISICSSDKRIACEEEFSDSEEEGEGGRKNSSNFKKAKRVKTEDEKEKDPEEKKEVTEEEKTKEEKPEAKGVKEEVKLA

SEQ ID NO: 118 - protein, 488 aa, Homo sapiens
MAYSQGGGKKKVCYYYDGDIGNYYYGQGHPMKPHRIRMTHNLLLNYGLYRKMEIYRPHKATAEEMTKYHSDEYIKFLRSIRPDNMSEYSKQMQRFNVGEDCPVFDGLFEFCQLSTGGSVAGAVKLNRQQTDMAVNWAGGLHHAKKSEASGFCYVNDIVLAILELLKYHQRVLYIDIDIHHGDGVEEAFYTTDRVMTVSFHKYGEYFPGTGDLRDIGAGKGKYYAVNFPMRDGIDDESYGQIFKPIISKVMEMYQPSAVVLQCGADSLSGDRLGCFNLTVKGHAKCVEVVKTFNLPLLMLGGGGYTIRNVARCWTYETAVALDCEIPNELPYNDYFEYFGPDFKLHISPSNMTNQNTPEYMEKIKQRLFENLRMLPHAPGVQMQAIPEDAVHEDSGDEDGEDPDKRISIRASDKRIACDEEFSDSEDEGEGGRRNVADHKKGAKKARIEEDKKETEDKKTDVKEEDKSKDNSGEKTDTKGTKSEQLSNP

SEQ ID NO: 119 - protein, 317 aa, Homo sapiens
MSHGPKQPGAAAAPAGGKAPGQHGGFVVTVKQERGEGPRAGEKGSHEEEPVKKRGWPKGKKRKKILPNGPKAPVTGYVRFLNERREQIRTRHPDLPFPEITKMLGAEWSKLQPTEKQRYLDEAEREKQQYMKELRAYQQSEAYKMCTEKIQEKKIKKEDSSSGLMNTLLNGHKGGDCDGFSTFDVPIFTEEFLDQNKAREAELRRLRKMNVAFEEQNAVLQRHTQSMSSARERLEQELALEERRTLALQQQLQAVRQALTASFASLPVPGTGETPTLGTLDFYMARLHGAIERDPAQHEKLIVRIKEILAQVASEHL

SEQ ID NO: 120 - protein, 832 aa, Homo sapiens
MSEAGGAGPGGCGAGAGAGAGPGALPPQPAALPPAPPQGSPCAAAAGGSGACGPATAVAAAGTAEGPGGGGSARIAVKKAQLRSAPRAKKLEKLGVYSACKAEESCKCNGWKNPNPSPTPPRADLQQIIVSLTESCRSCSHALAAHVSHLENVSEEEMNRLLGIVLDVEYLFTCVHKEEDADTKQVYFYLFKLLRKSILQRGKPVVEGSLEKKPPFEKPSIEQGVNNFVQYKFSHLPAKERQTIVELAKMFLNRINYWHLEAPSQRRLRSPNDDISGYKENYTRWLCYCNVPQFCDSLPRYETTQVFGRTLLRSVFTVMRRQLLEQARQEKDKLPLEKRTLILTHFPKFLSMLEEEVYSQNSPIWDQDFLSASSRTSQLGIQTVINPPPVAGTISYNSTSSSLEQPNAGSSSPACKASSGLEANPGEKRKMTDSHVLEEAKKPRVMGDIPMELINEVMSTITDPAAMLGPETNFLSAHSARDEAARLEERRGVIEFHVVGNSLNQKPNKKILMWLVGLQNVFSHQLPRMPKEYITRLVFDPKHKTLALIKDGRVIGGICFRMFPSQGFTEIVFCAVTSNEQVKGYGTHLMNHLKEYHIKHDILNFLTYADEYAIGYFKKQGFSKEIKIPKTKYVGYIKDYEGATLMGCELNPRIPYTEFSVIIKKQKEIIKKLIERKQAQIRKVYPGLSCFKDGVRQIPIESIPGIRETGWKPSGKEKSKEPRDPDQLYSTLKSILQQVKSHQSAWPFMEPVKRTEAPGYYEVIRFPMDLKTMSERLKNRYYVSKKLFMADLQRVFTNCKEYNPPESEYYKCANILEKFFFSKIKEAGLIDK

SEQ ID NO: 121 - protein, 1232 aa, Homo sapiens
MKEEVKGIPVRVALRCRPLVPKEISEGCQMCLSFVPGEPQVVVGTDKSFTYDFVFDPSTEQEEVFNTAVAPLIKGVFKGYNATVLAYGQTGSGKTYSMGGAYTAEQENEPTVGVIPRVIQLLFKEIDKKSDFEFTLKVSYLEIYNEEILDLLCPSREKAQINIREDPKEGIKIVGLTEKTVLVALDTVSCLEQGNNSRTVASTAMNSQSSRSHAIFTISLEQRKKSDKNSSFRSKLHLVDLAGSERQKKTKAEGDRLKEGININRGLLCLGNVISALGDDKKGGFVPYRDSKLTRLLQDSLGGNSHTLMIACVSPADSNLEETLNTLRYADRARKIKNKPIVNIDPQTAELNHLKQQVQQLQVLLLQAHGGTLPGSITVEPSENLQSLMEKNQSLVEENEKLSRGLSEAAGQTAQMLERIILTEQANEKMNAKLEELRQHAACKLDLQKLVETLEDQELKENVEIICNLQQLITQLSDETVACMAAAIDTAVEQEAQVETSPETSRSSDAFTTQHALRQAQMSKELVELNKALALKEALARKMTQNDSQLQPIQYQYQDNIKELELEVINLQKEKEELVLELQTAKKDANQAKLSERRRKRLQELEGQIADLKKKLNEQSKLLKLKESTERTVSKLNQEIRMMKNQRVQLMRQMKEDAEKFRQWKQKKDKEVIQLKERDRKRQYELLKLERNFQKQSNVLRRKTEEAAAANKRLKDALQKQREVADKRKETQSRGMEGTAARVKNWLGNEIEVMVSTEEAKRHLNDLLEDRKILAQDVAQLKEKKESGENPPPKLRRRTFSLTEVRGQVSESEDSITKQIESLETEMEFRSAQIADLQQKLLDAESEDRPKQRWENIATILEAKCALKYLIGELVSSKIQVSKLESSLKQSKTSCADMQKMLFEERNHFAEIETELQAELVRMEQQHQEKVLYLLSQLQQSQMAEKQLEESVSEKEQQLLSTLKCQDEELEKMREVCEQNQQLLRENEIIKQKLTLLQVASRQKHLPKDTLLSPDSSFEYVPPKPKPSRVKEKFLEQSMDIEDLKYCSEHSVNEHEDGDGDDDEGDDEEWKPTKLVKVSRKNIQGCSCKGWCGNKQCGCRKQKSDCGVDCCCDPTKCRNRQQGKDSLGTVERTQDSEGSFKLEDPTEVTPGLSFFNPVCATPNSKILKEMCDVEQVLSKKTPPAPSPFDLPELKHVATEYQENKAPGKKKKRALASNTSFFSGCSPIEEEAH

SEQ ID NO: 122 - protein, 574 aa, Homo sapiens
MGNSEGCNTKKEGDLIAAQARLKDLEALLNSKEAALSTALSEKRTLEGELHDLRGQVAKLEAALGEAKKQLQDEMLRRVDAENRLQTMKEELDFQKNIYSEELRETKRRHETRLVEIDNGKQREFESRLADALQELRAQHEDQVEQYKKELEKTYSAKLDNARQSAERNSNLVGAAHEELQQSRIRIDSLSAQLSQLQKQLAAKEAKLRDLEDSLARERDTSRRLLAEKEREMAEMRARMQQQLDEYQELLDIKLALDMEIHAYRKLLEGEEERLRLSPSPTSQRSRGRASSHSSQTQGGGSVTKKRKLESTESRSSFSQHARTSGRVAVEEVDEEGKFVRLRNKSNEDQSMGNWQIKRQNGDDPLLTYRFPPKFTLKAGQVVTIWAAGAGATHSPPTDLVWKAQNTWGCGNSLRTALINSTGEEVAMRKLVRSVTVVEDDEDEDGDDLLHHHHGSHCSSSGDPAEYNLRSRTVLCGTCGQPADKASASGSGAQVGGPISSGSSASSVTVTRSYRSVGGSGGGSFGDNLVTRSYLLGNSSPRTQSPQNCSIIQEMGMRWEVEEGRRKVSLSCLP

SEQ ID NO: 123 - protein, 610 aa, Homo sapiens
MAAPILKDVVAYVEVWSSNGTENYSKTFTTQLVDMGAKVSKTFNKQVTHVIFKDGYQSTWDKAQKRGVKLVSVLWVEKCRTAGAHIDESLFPAANMNEHLSSLIKKKRKCMQPKDFNFKTPENDKRFQKKFEKMAKELQRQKTNLDDDVPILLFESNGSLIYTPTIEINSSHHSAMEKRLQEMKEKRENLSPTSSQMIQQSHDNPSNSLCEAPLNISRDTLCSDEYFAGGLHSSFDDLCGNSGCGNQERKLEGSINDIKSDVCISSLVLKANNIHSSPSFTHLDKSSPQKFLSNLSKEEINLQRNIAGKVVTPDQKQAAGMSQETFEEKYRLSPTLSSTKGHLLIHSRPRSSSVKRKRVSHGSHSPPKEKCKRKRSTRRSIMPRLQLCRSEDRLQHVAGPALEALSCGESSYDDYFSPDNLKERYSENLPPESQLPSSPAQLSCRSLSKKERTSIFEMSDFSCVGKKTRTVDITNFTAKTISSPRKTGNGEGRATSSCVTSAPEEALRCCRQAGKEDACPEGNGFSYTIEDPALPKGHDDDLTPLEGSLEEMKEAVGLKSTQNKGTTSKISNSSEGEAQSEHEPCFIVDCNMETSTEEKENLPGGYSGSM

SEQ ID NO: 124 - protein, 238 aa, Homo sapiens
MLGQPAPLERFASRRPQVLAVRTVCDLVLGKMDKDCEMKRTTLDSPLGKLELSGCEQGLHEIKLLGKGTSAADAVEVPAPAAVLGGPEPLMQCTAWLNAYFHQPEAIEEFPVPALHHPVFQQESFTRQVLWKLLKVVKFGEVISYQQLAALAGNPKAARAVGGAMRGNPVPILIPCHRVVCSSGAVGNYSGGLAVKEWLLAHEGHRLGKPGLGGSSGLAGAWLKGAGATSGSPPAGRN

SEQ ID NO: 125 - protein, 756 aa, Homo sapiens
MSFVAGVIRRLDETVVNRIAAGEVIQRPANAIKEMIENCLDAKSTSIQVIVKEGGLKLIQIQDNGTGIRKEDLDIVCERFTTSKLQSFEDLASISTYGFRGEALASISHVAHVTITTKTADGKCAYRASYSDGKLKAPPKPCAGNQGTQITVEDLFYNIATRRKALKNPSEEYGKILEVVGRYSVHNAGISFSVKKQGETVADVRTLPNASTVDNIRSIFGNAVSRELIEIGCEDKTLAFKMNGYISNANYSVKKCIFLLFINHRLVESTSLRKAIETVYAAYLPKNTHPFLYLSLEISPQNVDVNVHPTKHEVHFLHEESILERVQQHIESKLLGSNSSRMYFTQTLLPGLAGPSGEMVKSTTSLTSSSTSGSSDKVYAHQMVRTDSREQKLDAFLQPLSKPLSSQPQAIVTEDKTDISSGRARQQDEEMLELPAPAEVAAKNQSLEGDTTKGTSEMSEKRGPTSSNPRKRHREDSDVEMVEDDSRKEMTAACTPRRRIINLTSVLSLQEEINEQGHEVLREMLHNHSFVGCVNPQWALAQHQTKLYLLNTTKLSEELFYQILIYDFANFGVLRLSEPAPLFDLAMLALDSPESGWTEEDGPKEGLAEYIVEFLKKKAEMLADYFSLEIDEEGNLIGLPLLIDNYVPPLEGLPIFILRLATEVNWDEEKECFESLSKECAMFYSIRKQYISEESTLSGQQSEVPGSIPNSWKWTVEHIVYKALRSHILPPKHFTEDGNILQLANLPDLYKVFERC

SEQ ID NO: 126 - protein, 1453 aa, Homo sapiens
MIKCLSVEVQAKLRSGLAISSLGQCVEELALNSIDAEAKCVAVRVNMETFQVQVIDNGFGMGSDDVEKVGNRYFTSKCHSVQDLENPRFYGFRGEALANIADMASAVEISSKKNRTMKTFVKLFQSGKALKACEADVTRASAGTTVTVYNLFYQLPVRRKCMDPRLEFEKVRQRIEALSLMHPSISFSLRNDVSGSMVLQLPKTKDVCSRFCQIYGLGKSQKLREISFKYKEFELSGYISSEAHYNKNMQFLFVNKRLVLRTKLHKLIDFLLRKESIICKPKNGPTSRQMNSSLRHRSTPELYGIYVINVQCQFCEYDVCMEPAKTLIEFQNWDTLLFCIQEGVKMFLKQEKLFVELSGEDIKEFSEDNGFSLFDATLQKRVTSDERSNFQEACNNILDSYEMFNLQSKAVKRKTTAENVNTQSSRDSEATRKNTNDAFLYIYESGGPGHSKMTEPSLQNKDSSCSESKMLEQETIVASEAGENEKHKKSFLEHSSLENPCGTSLEMFLSPFQTPCHFEESGQDLEIWKESTTVNGMAANILKNNRIQNQPKRFKDATEVGCQPLPFATTLWGVHSAQTEKEKKKESSNCGRRNVFSYGRVKLCSTGFITHVVQNEKTKSTETEHSFKNYVRPGPTRAQETFGNRTRHSVETPDIKDLASTLSKESGQLPNKKNCRTNISYGLENEPTATYTMFSAFQEGSKKSQTDCILSDTSPSFPWYRHVSNDSRKTDKLIGFSKPIVRKKLSLSSQLGSLEKFKRQYGKVENPLDTEVEESNGVTTNLSLQVEPDILLKDKNRLENSDVCKITTMEHSDSDSSCQPASHILNSEKFPFSKDEDCLEQQMPSLRESPMTLKELSLFNRKPLDLEKSSESLASKLSRLKGSERETQTMGMMSRFNELPNSDSSRKDSKLCSVLTQDFCMLFNNKHEKTENGVIPTSDSATQDNSFNKNSKTHSNSNTTENCVISETPLVLPYNNSKVTGKDSDVLIRASEQQIGSLDSPSGMLMNPVEDATGDQNGICFQSEESKARACSETEESNTCCSDWQRHFDVALGRMVYVNKMTGLSTFIAPTEDIQAACTKDLTTVAVDVVLENGSQYRCQPFRSDLVLPFLPRARAERTVMRQDNRDTVDDTVSSESLQSLFSEWDNPVFARYPEVAVDVSSGQAESLAVKIHNILYPYRFTKGMIHSMQVLQQVDNKFIACLMSTKTEENGEAGGNLLVLVDQHAAHERIRLEQLIIDSYEKQQAQGSGRKKLLSSTLIPPLEITVTEEQRRLLWCYHKNLEDLGLEFVFPDTSDSLVLVGKVPLCFVEREANELRRGRSTVTKSIVEEFIREQLELLQTTGGIQGTLPLTVQKVLASQACHGAIKFNDGLSLQESCRLIEALSSCQLPFQCAHGRPSMLPLADIDHLEQEKQIKPNLTKLRKMAQAWRLFGKAECDTRQSLQQSMPPCEPP

SEQ ID NO: 127 - protein, 122 aa, Homo sapiens
MSKKKGLSAEEKRTRMMEIFSETKDVFQLKDLEKIAPKEKGITAMSVKEVLQSLVDDGMVDCERIGTSNYYWAFPSKALHARKHKLEVLESQLSEGSQKHASLQKSIEKAKIGRCETAKQIK

SEQ ID NO: 128 - protein, 235 aa, Homo sapiens
MRGAAPGKKTSGLQQKNVEVKTKKNKQKTPGNGDGGSTSETPQPPRKKRARVDPTVENEETFMNRVEVKVKIPEELKPWLVDDWDLITRQKQLFYLPAKKNVDSILEDYANYKKSRGNTDNKEYAVNEVVAGIKEYFNVMLGTQLLYKFERPQYAEILADHPDAPMSQVYGAPHLLRLFVRIGAMLAYTPLDEKSLALLLNYLHDFLKYLAKNSATLFSASDYEVAPPEYHRKAV

SEQ ID NO: 129 - protein, 680 aa, Homo sapiens
MSTADALDDENTFKILVATDIHLGFMEKDAVRGNDTFVTLDEILRLAQENEVDFILLGGDLFHENKPSRKTLHTCLELLRKYCMGDRPVQFEILSDQSVNFGFSKFPWVNYQDGNLNISIPVFSIHGNHDDPTGADALCALDILSCAGFVNHFGRSMSVEKIDISPVLLQKGSTKIALYGLGSIPDERLYRMFVNKKVTMLRPKEDENSWFNLFVIHQNRSKHGSTNFIPEQFLDDFIDLVIWGHEHECKIAPTKNEQQLFYISQPGSSVVTSLSPGEAVKKHVGLLRIKGRKMNMHKIPLHTVRQFFMEDIVLANHPDIFNPDNPKVTQAIQSFCLEKIEEMLENAERERLGNSHQPEKPLVRLRVDYSGGFEPFSVLRFSQKFVDRVANPKDIIHFFRHREQKEKTGEEINFGKLITKPSEGTTLRVEDLVKQYFQTAEKNVQLSLLTERGMGEAVQEFVDKEEKDAIEELVKYQLEKTQRFLKERHIDALEDKIDEEVRRFRETRQKNTNEEDDEVREAMTRARALRSQSEESASAFSADDLMSIDLAEQMANDSDDSISAATNKGRGRGRGRRGGRGQNSASRGGSQRGRAFKSTRQQPSRNVTTKNYSEVIEVDESDVEEDIFPTTSKTDQRWSSTSSSKIMSQSQVSKGVDFESSEDDDDDPFMNTSSLRRNRR

SEQ ID NO: 130 - protein, 936 aa, Homo sapiens
MLRPEISSTSPSAPAVSPSSGETRSPQGPRYNFGLQETPQSRPSVQVVSASTCPGTSGAAGDRSSSSSSLPCPAPNSRPAQGSYFGNKRAYAENTVASNFTFGASSSSARDTNYPQTLKTPLSTGNPQRSGYKSWTPQVGYSASSSSAISAHSPSVIVAVVEGRGLARGEIGMASIDLKNPQIILSQFADNTTYAKVITKLKILSPLEIIMSNTACAVGNSTKLFTLITENFKNVNFTTIQRKYFNETKGLEYIEQLCIAEFSTVLMEVQSKYYCLAAVAALLKYVEFIQNSVYAPKSLKICFQGSEQTAMIDSSSAQNLELLINNQDYRNNHTLFGVLNYTKTPGGSRRLRSNILEPLVDIETINMRLDCVQELLQDEELFFGLQSVISRFLDTEQLLSVLVQIPKQDTVNAAESKITNLIYLKHTLELVDPLKIAMKNCNTPLLRAYYGSLEDKRFGIILEKIKTVINDDARYMKGCLNMRTQKCYAVRSNINEFLDIARRTYTEIVDDIAGMISQLGEKYSLPLRTSFSSARGFFIQMTTDCIALPSDQLPSEFIKISKVKNSYSFTSADLIKMNERCQESLREIYHMTYMIVCKLLSEIYEHIHCLYKLSDTVSMLDMLLSFAHACTLSDYVRPEFTDTLAIKQGWHPILEKISAEKPIANNTYVTEGSNFLIITGPNMSGKSTYLKQIALCQIMAQIGSYVPAEYSSFRIAKQIFTRISTDDDIETNSSTFMKEMKEIAYILHNANDKSLILIDELGRGTNTEEGIGICYAVCEYLLSLKAFTLFATHFLELCHIDALYPNVENMHFEVQHVKNTSRNKEAILYTYKLSKGLTEEKNYGLKAAEVSSLPPSIVLDAKEITTQITRQILQNQRSTPEMERQRAVYHLATRLVQTARNSQLDPDSLRIYLSNLKKKYKEDFPRTEQVPEKTEE

SEQ ID NO: 131 - protein, 668 aa, Homo sapiens
MAANMYRVGDYVYFENSSSNPYLVRRIEELNKTANGNVEAKVVCLFRRRDISSSLNSLADSNAREFEEESKQPGVSEQQRHQLKHRELFLSRQFESLPATHIRGKCSVTLLNETDILSQYLEKEDCFFYSLVFDPVQKTLLADQGEIRVGCKYQAEIPDRLVEGESDNRNQQKMEMKVWDPDNPLTDRQIDQFLVVARAVGTFARALDCSSSIRQPSLHMSAAAASRDITLFHAMDTLQRNGYDLAKAMSTLVPQGGPVLCRDEMEEWSASEAMLFEEALEKYGKDFNDIRQDFLPWKSLASIVQFYYMWKTTDRYIQQKRLKAAEADSKLKQVYIPTYTKPNPNQIISVGSKPGMNGAGFQKGLTCESCHTTQSAQWYAWGPPNMQCRLCASCWIYWKKYGGLKTPTQLEGATRGTTEPHSRGHLSRPEAQSLSPYTTSANRAKLLAKNRQTFLLQTTKLTRLARRMCRDLLQPRRAARRPYAPINANAIKAECSIRLPKAAKTPLKIHPLVRLPLATIVKDLVAQAPLKPKTPRGTKTPINRNQLSQNRGLGGIMVKRAYETMAGAGVPFSANGRPLASGIRSSSQPAAKRQKLNPADAPNPVVFVATKDTRALRKALTHLEMRRAARRPNLPLKVKPTLIAVRPPVPLPAPSHPASTNEPIVLED

SEQ ID NO: 132 - protein, 1186 aa, Homo sapiens [sequence omitted]

SEQ ID NO: 133 - protein, 261 aa, Homo sapiens
MFEARLVQGSILKKVLEALKDLINEACWDISSSGVNLQSMDSSHVSLVQLTLRSEGFDTYRCDRNLAMGVNLTSMSKILKCAGNEDIITLRAEDNADTLALVFEAPNQEKVSDYEMKLMDLDVEQLGIPEQEYSCVVKMPSGEFARICRDLSHIGDAVVISCAKDGVKFSASGELGNGNIKLSQTSNVDKEEEAVTIEMNEPVQLTFALRYLNFFTKATPLSSTVTLSMSADVPLVVEYKIADMGHLKYYLAPKIEDEEGS

SEQ ID NO: 134 - protein, 1447 aa, Homo sapiens
MAHSKTRTNDGKITYPPGVKEISDKISKEEMVRRLKMVVKTFMDMDQDSEEEKELYLNLALHLASDFFLKHPDKDVRLLVACCLADIFRIYAPEAPYTSPDKLKDIFMFITRQLKGLEDTKSPQFNRYFYLLENIAWVKSYNICFELEDSNEIFTQLYRTLFSVINNGHNQKVHMHMVDLMSSIICEGDTVSQELLDTVLVNLVPAHKNLNKQAYDLAKALLKRTAQAIEPYITNFFNQVLMLGKTSISDLSEHVFDLILELYNIDSHLLLSVLPQLEFKLKSNDNEERLQVVKLLAKMFGAKDSELASQNKPLWQCYLGRFNDIHVPIRLECVKFASHCLMNHPDLAKDLTEYLKVRSHDPEEAIRHDVIVSIVTAAKKDILLVNDHLLNFVRERTLDKRWRVRKEAMMGLAQIYKKYALQSAAGKDAAKQIAWIKDKLLHIYYQNSIDDRLLVERIFAQYMVPHNLETTERMKCLYYLYATLDLNAVKALNEMWKCQNLLRHQVKDLLDLIKQPKTDASVKAIFSKVMVITRNLPDPGKAQDFMKKFTQVLEDDEKIRKQLEVLVSPTCSCKQAEGCVREITKKLGNPKQPTNPFLEMIKFLLERIAPVHIDTESISALIKQVNKSIDGTADDEDEGVPTDQAIRAGLELLKVLSFTHPISFHSAETFESLLACLKMDDEKVAEAALQIFKNTGSKIEEDFPHIRSALLPVLHHKSKKGPPRQAKYAIHCIHAIFSSKETQFAQIFEPLHKSLDPSNLEHLITPLVTIGHIALLAPDQFAAPLKSLVATFIVKDLLMNDRLPGKKTTKLWVPDEEVSPETMVKIQAIKMMVRWLLGMKNNHSKSGTSTLRLLTTILHSDGDLTEQGKISKPDMSRLRLAAGSAIVKLAQEPCYHEIITLEQYQLCALAINDECYQVRQVFAQKLHKGLSRLRLPLEYMAICALCAKDPVKERRAHARQCLVKNINVRREYLKQHAAVSEKLLSLLPEYVVPYTIHLLAHDPDYVKVQDIEQLKDVKECLWFVLEILMAKNENNSHAFIRKMVENIKQTKDAQGPDDAKMNEKLYTVCDVAMNIIMSKSTTYSLESPKDPVLPARFFTQPDKNFSNTKNYLPPEMKSFFTPGKPKTTNVLGAVNKPLSSAGKQSQTKSSRMETVSNASSSSNPSSPGRIKGRLDSSEMDHSENEDYTMSSPLPGKKSDKRDDSDLVRSELEKPRGRKKTPVTEQEEKLGMDDLTKLVQEQKPKGSQRSRKRGHTASESDEQQWPEEKRLKEDILENEDEQNSPPKKGKRGRPPKPLGGGTPKEEPTMKTSKKGSKKKSGPPAPEEEEEEERQSGNTEQKSKSKQHRVSRRAQQRAESPESSAIESTQSTPQKGRGRPSKTPSPSQPKKNVRVGRSKQAATKENDSSEEVDVFQGSSPVDDIPQEETEEEEVSTVNVRRRSAKRERR

SEQ ID NO: 135 - protein, 603 aa, Homo sapiens
MSAAVTAGKLARAPADPGKAGVPGVAAPGAPAAAPPAKEIPEVLVDPRSRRRYVRGRFLGKGGFAKCFEISDADTKEVFAGKIVPKSLLLKPHQREKMSMEISIHRSLAHQHVVGFHGFFEDNDFVFVVLELCRRRSLLELHKRRKALTEPEARYYLRQIVLGCQYLHRNRVIHRDLKLGNLFLNEDLEVKIGDFGLATKVEYDGERKKTLCGTPNYIAPEVLSKKGHSFEVDVWSIGCIMYTLLVGKPPFETSCLKETYLRIKKNEYSIPKHINPVAASLIQKMLQTDPTARPTINELLNDEFFTSGYIPARLPITCLTIPPRFSIAPSSLDPSNRKPLTVLNKGLENPLPERPREKEEPVVRETGEVVDCHLSDMLQQLHSVNASKPSERGLVRQEEAEDPACIPIFWVSKWVDYSDKYGLGYQLCDNSVGVLFNDSTRLILYNDGDSLQYIERDGTESYLTVSSHPNSLMKKITLLKYFRNYMSEHLLKAGANITPREGDELARLPYLRTWFRTRSAIILHLSNGSVQINFFQDHTKLILCPLMAAVTYIDEKRDFRTYRLSLLEEYGCCKELASRLRYARTMVDKLLSSRSASNRLKAS

SEQ ID NO: 136 - protein, 932 aa, Homo sapiens
MKQLPAATVRLLSSSQIITSVVSVVKELIENSLDAGATSVDVKLENYGFDKIEVRDNGEGIKAVDAPVMAMKYYTSKINSHEDLENLTTYGFRGEALGSICCIAEVLITTRTAADNFSTQYVLDGSGHILSQKPSHLGQGTTVTALRLFKNLPVRKQFYSTAKKCKDEIKKIQDLLMSFGILKPDLRIVFVHNKAVIWQKSRVSDHKMALMSVLGTAVMNNMESFQYHSEESQIYLSGFLPKCDADHSFTSLSTPERSFIFINSRPVHQKDILKLIRHHYNLKCLKESTRLYPVFFLKIDVPTADVDVNLTPDKSQVLLQNKESVLIALENLMTTCYGPLPSTNSYENNKTDVSAADIVLSKTAETDVLFNKVESSGKNYSNVDTSVIPFQNDMHNDESGKNTDDCLNHQISIGDFGYGHCSSEISNIDKNTKNAFQDISMSNVSWENSQTEYSKTCFISSVKHTQSENGNKDHIDESGENEEEAGLENSSEISADEWSRGNILKNSVGENIEPVKILVPEKSLPCKVSNNNYPIPEQMNLNEDSCNKKSNVIDNKSGKVTAYDLLSNRVIKKPMSASALFVQDHRPQFLIENPKTSLEDATLQIEELWKTLSEEEKLKYEEKATKDLERYNSQMKRAIEQESQMSLKDGRKKIKPTSAWNLAQKHKLKTSLSNQPKLDELLQSQIEKRRSQNIKMVQIPFSMKNLKINFKKQNKVDLEEKDEPCLIHNLRFPDAWLMTSKTEVMLLNPYRVEEALLFKRLLENHKLPAEPLEKPIMLTESLFNGSHYLDVLYKMTADDQRYSGSTYLSDPRLTANGFKIKLIPGVSITENYLEIEGMANCLPFYGVADLKEILNAILNRNAKEVYECRPRKVISYLEGEAVRLSRQLPMYLSKEDIQDIIYRMKHQFGNEIKECVHGRPFFHHLTYLPETT

SEQ ID NO: 137 - protein, 862 aa, Homo sapiens
MERAESSSTEPAKAIKPIDRKSVHQICSGQVVLSLSTAVKELVENSLDAGATNIDLKLKDYGVDLIEVSDNGCGVEEENFEGLTLKHHTSKIQEFADLTQVETFGFRGEALSSLCALSDVTISTCHASAKVGTRLMFDHNGKIIQKTPYPRPRGTTVSVQQLFSTLPVRHKEFQRNIKKEYAKMVQVLHAYCIISAGIRVSCTNQLGQGKRQPVVCTGGSPSIKENIGSVFGQKQLQSLIPFVQLPPSDSVCEEYGLSCSDALHNLFYISGFISQCTHGVGRSSTDRQFFFINRRPCDPAKVCRLVNEVYHMYNRHQYPFVVLNISVDSECVDINVTPDKRQILLQEEKLLLAVLKTSLIGMFDSDVNKLNVSQQPLLDVEGNLIKMHAADLEKPMVEKQDQSPSLRTGEEKKDVSISRLREAFSLRHTTENKPHSPKTPEPRRSPLGQKRGMLSSSTSGAISDKGVLRPQKEAVSSSHGPSDPTDRAEVEKDSGHGSTSVDSEGFSIPDTGSHCSSEYAASSPGDRGSQEHVDSQEKAPETDDSFSDVDCHSNQEDTGCKFRVLPQPTNLATPNTKRFKKEEILSSSDICQKLVNTQDMSASQVDVAVKINKKVVPLDFSMSSLAKRIKQLHHEAQQSEGEQNYRKFRAKICPGENQAAEDELRKEISKTMFAEMEIIGQFNLGFIITKLNEDIFIVDQHATDEKYNFEMLQQHTVLQGQRLIAPQTLNLTAVNEAVLIENLEIFRKNGFDFVIDENAPVTERAKLISLPTSKNWTFGPQDVDELIFMLSDSPGVMCRPSRVKQMFASRACRKSVMIGTALNTSEMKKLITHMGEMDHPWNCPHGRPTMRHIANLGVISQN

SEQ ID NO: 138 - protein, 154 aa, Homo sapiens
MYGKQKIYFADQDQFDMVSDADLQVLDGKIVALTAKVQSLQQSCRYMEAELKELSSALTTPEMQKEIQELKKECAGYRERLKNIKAATNHVTPEEKEQVYRERQKYCKEWRKRKRMATELSDAILEGYPKSKKQFFEEVGIETDEDYNVTLPDP

SEQ ID NO: 139 - protein, 534 aa, Homo sapiens
MKQEGSARRRGADKAKPPPGGGEQEPPPPPAPQDVEMKEEAATGGGSTGEADGKTAAAAAEHSQRELDTVTLEDIKEHVKQLEKAVSGKEPRFVLRALRMLPSTSRRLNHYVLYKAVQGFFTSNNATRDFLLPFLEEPMDTEADLQFRPRTGKAASTPLLPEVEAYLQLLVVIFMMNSKRYKEAQKISDDLMQKISTQNRRALDLVAAKCYYYHARVYEFLDKLDVVRSFLHARLRTATLRHDADGQATLLNLLLRNYLHYSLYDQAEKLVSKSVFPEQANNNEWARYLYYTGRIKAIQLEYSEARRTMTNALRKAPQHTAVGFKQTVHKLLIVVELLLGEIPDRLQFRQPSLKRSLMPYFLLTQAVRTGNLAKFNQVLDQFGEKFQADGTYTLIIRLRHNVIKTGVRMISLSYSRISLADIAQKLQLDSPEDAEFIVAKAIRDGVIEASINHEKGYVQSKEMIDIYSTREPQLAFHQRISFCLDIHNMSVKAMRFPPKSYNKDLESAEERREREQQDLEFAKEMAEDDDDSFP

SEQ ID NO: 140 - protein, 442 aa, Homo sapiens
MPLENLEEEGLPKNPDLRIAQLRFLLSLPEHRGDAAVRDELMAAVRDNNFWNRIRQEQTEDCPPSSPSRGWHCQDWPSRKPPTSIRLCFAKPIIKRHRMPSYMAPYYEALCKSLDWQIDVDLLNKMKKANEDELKRLDEELEDAEKNLGESEIRDAMMAKAEYLCRIGDKEGALTAFRKTYDKTVALGHRLDIVFYLLRIGLFYMDNDLITRNTEKAKSLIEEGGDWDRRNRLKVYQGLYCVAIRDFKQAAELFLDTVSTFTSYELMDYKTFVTYTVYVSMIALERPDLREKVIKGAEILEVLHSLPAVRQYLFSLYECRYSVFFQSLAVVEQEMKKDWLFAPHYRYYVREMRIHAYSQLLESYRSLTLGYMAEAFGVGVEFIDQELSRFIAAGRLHCKIDKVNEIVETNRPDSKNWQYQETIKKGDLLLNRVQKLSRVINM

SEQ ID NO: 141 - protein, 631 aa, Homo sapiens
MFYAHFVLSKRGPLAKIWLAAHWDKKLTKAHVFECNLESSVESIISPKVKMALRTSGHLLLGVVRIYHRKAKYLLADCNEAFIKIKMAFRPGVVDLPEENREAAYNAITLPEEFHDFDQPLPDLDDIDVAQQFSLNQSRVEEITMREEVGNISILQENDFGDFGMDDREIMREGSAFEDDDMLVSTTTSNLLLESEQSTSNLNEKINHLEYEDQYKDDNFGEGNDGGILDDKLISNNDGGIFDDPPALSEAGVMLPEQPAHDDMDEDDNVSMGGPDSPDSVDPVEPMPTMTDQTTLVPNEEEAFALEPIDITVKETKAKRKRKLIVDSVKELDSKTIRAQLSDYSDIVTTLDLAPPTKKLMMWKETGGVEKLFSLPAQPLWNNRLLKLFTRCLTPLVPEDLRKRRKGGEADNLDEFLKEFENPEVPREDQQQQHQQRDVIDEPIIEEPSRLQESVMEASRTNIDESAMPPPPPQGVKRKAGQIDPEPVMPPQQVEQMEIPPVELPPEEPPNICQLIPELELLPEKEKEKEKEKEDDEEEEDEDASGGDQDQEERRWNKRTQQMLHGLQRALAKTGAESISLLELCRNTNRKQAAAKFYSFLVLKKQQAIELTQEEPYSDIIATPGPRFHII

SEQ ID NO: 142 - protein, 362 aa, Homo sapiens
MAVTITLKTLQQQTFKIRMEPDETVKVLKEKIEAEKGRDAFPVAGQKLIYAGKILSDDVPIRDYRIDEKNFVVVMVTKTKAGQGTSAPPEASPTAAPESSTSFPPAPTSGMSHPPPAAREDKSPSEESAPTTSPESVSGSVPSSGSSGREEDAASTLVTGSEYETMLTEIMSMGYERERVVAALRASYNNPHRAVEYLLTGIPGSPEPEHGSVQESQVSEQPATEAGENPLEFLRDQPQFQNMRQVIQQNPALLPALLQQLGQENPQLLQQISRHQEQFIQMLNEPPGELADISDVEGEVGAIGEEAPQMNYIQVTPQEKEAIERLKALGFPESLVIQAYFACEKNENLAANFLLSQNFDDE

SEQ ID NO: 143 - protein, 1312 aa, Homo sapiens
MSRIEKMSILGVRSFGIEDKDKQIITFFSPLTILVGPNGAGKTTIIECLKYICTGDFPPGTKGNTFVHDPKVAQETDVRAQIRLQFRDVNGELIAVQRSMVCTQKSKKTEFKTLEGVITRTKHGEKVSLSSKCAEIDREMISSLGVSKAVLNNVIFCHQEDSNWPLSEGKALKQKFDEIFSATRYIKALETLRQVRQTQGQKVKEYQMELKYLKQYKEKACEIRDQITSKEAQLTSSKEIVKSYENELDPLKNRLKEIEHNLSKIMKLDNEIKALDSRKKQMEKDNSELEEKMEKVFQGTDEQLNDLYHNHQRTVREKERKLVDCHRELEKLNKESRLLNQEKSELLVEQGRLQLQADRHQEHIRARDSLIQSLATQLELDGFERGPFSERQIKNFHKLVRERQEGEAKTANQLMNDFAEKETLKQKQIDEIRDKKTGLGRIIELKSEILSKKQNELKNVKYELQQLEGSSDRILELDQELIKAERELSKAEKNSNVETLKMEVISLQNEKADLDRTLRKLDQEMEQLNHHTTTRTQMEMLTKDKADKDEQIRKIKSRHSDELTSLLGYFPNKKQLEDWLHSKSKEINQTRDRLAKLNKELASSEQNKNHINNELKRKEEQLSSYEDKLFDVCGSQDFESDLDRLKEEIEKSSKQRAMLAGATAVYSQFITQLTDENQSCCPVCQRVFQTEAELQEVISDLQSKLRLAPDKLKSTESELKKKEKRRDEMLGLVPMRQSIIDLKEKEIPELRNKLQNVNRDIQRLKNDIEEQETLLGTIMPEEESAKVCLTDVTIMERFQMELKDVERKIAQQAAKLQGIDLDRTVQQVNQEKQEKQHKLDTVSSKIELNRKLIQDQQEQIQHLKSTTNELKSEKLQISTNLQRRQQLEEQTVELSTEVQSLYREIKDAKEQVSPLETTLEKFQQEKEELINKKNTSNKIAQDKLNDIKEKVKNIHGYMKDIENYIQDGKDDYKKQKETELNKVIAQLSECEKHKEKINEDMRLMRQDIDTQKIQERWLQDNLTLRKRNEELKEVEEERKQHLKEMGQMQVLQMKSEHQKLEENIDNIKRNHNLALGRQKGYEEEIIHFKKELREPQFRDAEEKYREMMIVMRTTELVNKDLDIYYKTLDQAIMKFHSMKMEEINKIIRDLWRSTYRGQDIEYIEIRSDADENVSASDKRRNYNYRVVMLKGDTALDMRGRCSAGQKVLASLIIRLALAETFCLNCGIIALDEPTTNLDRENIESLAHALVEIIKSRSQQRNFQLLVITHDEDFVELLGRSEYVEKFYRIKKNIDQCSEIVKCSVSSLGFNVH

SEQ ID NO: 144 - protein, 340 aa, Homo sapiens
MAMQMQLEANADTSVEEESFGPQPISRLEQCGINANDVKKLEEAGFHTVEAVAYAPKKELINIKGISEAKADKILTESRSVARLECNSVILVYCTLRLSGSSDSPASASRVVGTTGGIETGSITEMFGEFRTGKTQICHTLAVTCQLPIDRGGGEGKAMYIDTEGTFRPERLLAVAERYGLSGSDVLDNVAYARAFNTDHQTQLLYQASAMMVESRYALLIVDSATALYRTDYSGRGELSARQMHLARFLRMLLRLADEFGVAVVITNQVVAQVDGAAMFAADPKKPIGGNIIAHASTTRLYLRKGRGETRICKIYDSPCLPEAEAMFAINADGVGDAKD

SEQ ID NO: 145 - protein, 350 aa, Homo sapiens
MGSKKLKRVGLSQELCDRLSRHQILTCQDFLCLSPLELMKVTGLSYRGVHELLCMVSRACAPKMQTAYGIKAQRSADFSPAFLSTTLSALDEALHGGVACGSLTEITGPPGCGKTQFCIMMSILATLPTNMGGLEGAVVYIDTESAFSAERLVEIAESRFPRYFNTEEKLLLTSSKVHLYRELTCDEVLQRIESLEEEIISKGIKLVILDSVASVVRKEFDAQLQGNLKERNKFLAREASSLKYLAEEFSIPVILTNQITTHLSGALASQADLVSPADDLSLSEGTSGSSCVIAALGNTWSHSVNTRLILQYLDSERRQILIAKSPLAPFTSFVYTIKEEGLVLQAYGNS

SEQ ID NO: 146 - protein, 135 aa, Homo sapiens
MRGKTFRFEMQRDLVSFPLSPAVRVKLVSAGFQTAEELLEVKPSELSKEVGISKAEALETLQIIRRECLTNKPRYAGTSESHKKCTALELLEQEHTQGFIITFCSALDDILGGGVPLMKTTEICGAPGVGKTQLW

SEQ ID NO: 147 - protein, 897 aa, Homo sapiens
MNISGSSCGSPNSADTSSDFKDLWTKLKECHDREVQGLQVKVTKLKQERILDAQRLEEFFTKNQQLREQQKVLHETIKVLEDRLRAGLCDRCAVTEEHMRKKQQEFENIRQQNLKLITELMNERNTLQEENKKLSEQLQQKIENDQQHQAAELECEEDVIPDSPITAFSFSGVNRLRRKENPHVRYIEQTHTKLEHSVCANEMRKVSKSSTHPQHNPNENEILVADTYDQSQSPMAKAHGTSSYTPDKSSFNLATVVAETLGLGVQEESETQGPMSPLGDELYHCLEGNHKKQPFEESTRNTEDSLRFSDSTSKTPPQEELPTRVSSPVFGATSSIKSGLDLNTSLSPSLLQPGKKKHLKTLPFSNTCISRLEKTRSKSEDSALFTHHSLGSEVNKIIIQSSNKQILINKNISESLGEQNRTEYGKDSNTDKHLEPLKSLGGRTSKRKKTEEESEHEVSCPQASFDKENAFPFPMDNQFSMNGDCVMDKPLDLSDRFSAIQRQEKSQGSETSKNKFRQVTLYEALKTIPKGFSSSRKASDGNCTLPKDSPGEPCSQECIILQPLNKCSPDNKPSLQIKEENAVFKIPLRPRESLETENVLDDIKSAGSHEPIKIQTRSDHGGCELASVLQLNPCRTGKIKSLQNNQDVSFENIQWSIDPGADLSQYKMDVTVIDTKDGSQSKLGGETVDMDCTLVSETVLLKMKKQEQKGEKSSNEERKMNDSLEDMFDRTTHEEYESCLADSFSQAADEEEELSTATKKLHTHGDKQDKVKQKAFVEPYFKGDERETSLQNFPHIEVVRKKEERRKLLGHTCKECEIYYADMPAEEREKKLASCSRHRFRYIPPNTPENFWEVGFPSTQTCMERGYIKEDLDPCPRPKRRQPYNAIFSPKGKEQKT

SEQ ID NO: 148 - protein, 616 aa, Homo sapiens
MVGQLSEGAIAAIMQKGDTNIKPILQVINIRPITTGNSPPRYRLLMSDGLNTLSSFMLATQLNPLVEEEQLSSNCVCQIHRFIVNTLKDGRRVVILMELEVLKSAEAVGVKIGNPVPYNEGLGQPQVAPPAPAASPAASSRPQPQNGSSGMGSTVSKAYGASKTFGKAAGPSLSHTSGGTQSKVVPIASLTPYQSKWTICARVTNKSQIRTWSNSRGEGKLFSLELVDESGEIRATAFNEQVDKFFPLIEVNKVYYFSKGTLKIANKQFTAVKNDYEMTFNNETSVMPCEDDHHLPTVQFDFTGIDDLENKSKDSLVDIIGICKSYEDATKITVRSNNREVAKRNIYLMDTSGKVVTATLWGEDADKFDGSRQPVLAIKGARVSDFGGRSLSVLSSSTIIANPDIPEAYKLRGWFDAEGQALDGVSISDLKSGGVGGSNTNWKTLYEVKSENLGQGDKPDYFSSVATVVYLRKENCMYQACPTQDCNKKVIDQQNGLYRCEKCDTEFPNFKYRMILSVNIADFQENQWVTCFQESAEAILGQNAAYLGELKDKNEQAFEEVFQNANFRSFIFRVRVKVETYNDESRIKATVMDVKPVDYREYGRRLVMSIRRSALM

SEQ ID NO: 149 - protein, 174 aa, Homo sapiens
MTAAPMDVRQWVDTDDTSSENTVVPPETYVKVAGHLRSFQNKKSLVAFKIMPLEDMNEFTTHILEVINAHMVLSKANSQPSAGRAPISNPGMSEAGNFGGNSFMPANGLTVAQNQVLNLIKACPRPEGLNFQDLKNQLKHMSVSSIKQAVDFLSNEGHIYSTVDDDHFKSTDAE

SEQ ID NO: 150 - protein, 121 aa, Homo sapiens
MVDMMDLPRSRINAGMLAQFIDKPVCFVGRLEKIHPTGKMFILSDGEGKNGTIELMEPLDEEISGIVEVVGRVTAKATILCTSYVQFKEDSHPFDLGLYNEAVKIIHDFPQFYPLGIVQHD

SEQ ID NO: 151 - protein, 418 aa, Homo sapiens
MRSLLLLSAFCLLEAALAAEVKKPAAAAAPGTAEKLSPKAATLAERSAGLAFSLYQAMAKDQAVENILVSPVVVASSLGLVSLGGKATTASQAKAVLSAEQLRDEEVHAGLGELLRSLSNSTARNVTWKLGSRLYGPSSVSFADDFVRSSKQHYNCEHSKINFRDKRSALQSINEWAAQTTDGKLPEVTKDVERTDGALLVNAMFFKPHWDEKFHHKMVDNRGFMVTRSYTVGVMMMHRTGLYNYYDDEKEKLQIVEMPLAHKLSSLIILMPHHVEPLERLEKLLTKEQLKIWMGKMQKKAVAISLPKGVVEVTHDLQKHLAGLGLTEAIDKNKADLSRMSGKKDLYLASVFHATAFELDTDGNPFDQDIYGREELRSPKLFYADHPFIFLVRDTQSGSLLFIGRLVRPKGDKMRDEL

SEQ ID NO: 152 - protein, 70 aa, Homo sapiens
MSEKKQPVDLGLLEEDDEFEEFPAEDWAGLDEDEDAHVWEDNWDDDNVEDDFSNQLRAELEKHGYKMETS

SEQ ID NO: 153 - protein, 452 aa, Homo sapiens
MFDIEYFRKDPRPFFKFAKEIYPGQFQPSLCHKFIALSDKEGKLLRNYTQNIDTLEQVAGIQRIIQCHGSFATASCLICKYKVDCEAVRGDIFNQVVPRCPRCPADEPLAIMKPEIVFFGENLPEQFHRAMKYDKDEVDLLIVIGSSLKVRPVALIPSSIPHEVPQILINREPLPHLHFDVELLGDCDVIINELCHRLGGEYAKLCCNPVKLSEITEKPPRTQKELAYLSELPPTPLHVSEDSSSPERTSPPDSSVIVTLLDQAAKSNDDLDVSESKGCMEEKPQEVQTSRNVESIAEQMENPDLKNVGSSTGEKNERTSVAGTVRKCWPNRVAKEQISRRLDGNQYLFLPPNRYIFHGAEVYSDSEDDVLSSSSCGSNSDSGTCQSPSLEEPMEDESEIEEFYNGLEDEPDVPERAGGAGFGTDGDDQEAINEAISVKQEVTDMNYPSNKS

SEQ ID NO: 154 - protein, 234 aa, Homo sapiens
MDFLRNLFSQTLSLGSQKERLLDELTLEGVARYMQSERCRRVICLVGAGISTSAGIPDFRSPSTGLYDNLEKYHLPYPEAIFEISYFKKHPEPFFALAKELYPGQFKPTICHYFMRLLKDKGLLLRCYTQNIDTLERIAGLEQEDLVEAHGTFYTSHCVSASCRHEYPLSWMKEKIFSEVTPKCEDCQSLVKPDIVFFGESLPARFFSCMQSDFLKVDLLLVMGTSLQGRGLAG

SEQ ID NO: 155 - protein, 210 aa, Homo sapiens
MDQPLAEHFSTLAKNSNLVRLNLSGCSGFSEFALQTLLSSCSRLDELNLSWCFDFTEKHVQVAVAHVSETITQLNLSGYRKNLQKSDLSTLVRRCPNLVHLDLSDSVMLKNDCFQEFFQLNYLQHLSLSRCYDIIPETLLELGEIPTLKTLQVFGIVPDGTLQLLKEALPHLQINCSHFTTIARPTIGNKKNQEIWGIKCRLTLQKPSCL

SEQ ID NO: 156 - protein, 465 aa, Homo sapiens
MNVTSLFSFTSPAVKRLLGWKQGDEEEKWAEKAVDALVKKLKKKKGAMEELEKALSCPGQPSNCVTIPRSLDGRLQVSHRKGLPHVIYCRVWRWPDLQSHHELKPLECCEFPFGSKQKEVCINPYHYKRVESPVLPPVLVPRHSEYNPQHSLLAQFRNLGQNEPHMPLNATFPDSFQQPNSHPFPHSPNSSYPNSPGSSSSTYPHSPTSSDPGSPFQMPADTPPPAYLPPEDPMTQDGSQPMDTNMMAPPLPSEINRGDVQAVAYEEPKHWCSIVYYELNNRVGEAFHASSTSVLVDGFTDPSNNKNRFCLGLLSNVNRNSTIENTRRHIGKGVHLYYVGGEVYAECLSDSSIFVQSRNCNYHHGFHPTTVCKIPSGCSLKIFNNQEFAQLLAQSVNHGFETVYELTKMCTIRMSFVKGWGAEYHRQDVTSTPCWIEIHLHGPLQWLDKVLTQMGSPHNPISSVS

SEQ ID NO: 157 - protein, 467 aa, Homo sapiens
MSSILPFTPPVVKRLLGWKKSAGGSGGAGGGEQNGQEEKWCEKAVKSLVKKLKKTGRLDELEKAITTQNCNTKCVTIPSTCSEIWGLSTPNTIDQWDTTGLYSFSEQTRSLDGRLQVSHRKGLPHVIYCRLWRWPDLHSHHELKAIENCEYAFNLKKDEVCVNPYHYQRVETPVLPPVLVPRHTEILTELPPLDDYTHSIPENTNFPAGIEPQSNYIPETPPPGYISEDGETSDQQLNQSMDTGSPAELSPTTLSPVNHSLDLQPVTYSEPAFWCSIAYYELNQRVGETFHASQPSLTVDGFTDPSNSERFCLGLLSNVNRNATVEMTRRHIGRGVRLYYIGGEVFAECLSDSAIFVQSPNCNQRYGWHPATVCKIPPGCNLKIFNNQEFAALLAQSVNQGFEAVYQLTRMCTIRMSFVKGWGAEYRRQTVTSTPCWIELHLNGPLQWLDKVLTQMGSPSVRCSSMS

SEQ ID NO: 158 - protein, 320 aa, Homo sapiens
MELCEFAFNMKKDEVCVNPYHYQRVETPVLPPVLVPRHTEIPAEFPPLDDYSHSIPENTNFPAGIEPQSNIPETPPPGYLSEDGETSDHQMNHSMDAGSPNLSPNPMSPAHNNLDLQPVTYCEPAFWCSISYYELNQRVGETFHASQPSMTVDGFTDPSNSERFCLGLLSNVNRNAAVELTRRHIGRGVRLYYIGGEVFAECLSDSAIFVQSPNCNQRYGWHPATVCKIPPGCNLKIFNNQEFAALLAQSVNQGFEAVYQLTRMCTIRMSFVKGWGAEYRRQTVTSTPCWIELHLNGPLQWLDKVLTQMGSPSIRCSSVS

SEQ ID NO: 159 - protein, 1217 aa, Homo sapiens
MYIKQVIIQGFRSYRDQTIVDPFSSKHNVIVGRNGSGKSNFFYAIQFVLSDEFSHLRPEQRLALLHEGTGPRVISAFVEIIFDNSDNRLPIDKEEVSLRRVIGAKKDQYFLDKKMVTKNDVMNLLESAGFSRSNPYYIVKQGKINQMATAPDSQRLKLLREVAGTRVYDERKEESISLMKETEGKREKINELLKYIEERLHTLEEEKEELAQYQKWDKMRRALEYTIYNQELNETRAKLDELSAKRETSGEKSRQLRDAQQDARDKMEDIERQVRELKTKISAMKEEKEQLSAERQEQIKQRTKLELKAKDLQDELAGNSEQRKRLLKERQKLLEKIEEKQKELAETEPKFNSVKEKEERGIARLAQATQERTDLYAKQGRGSQFTSKEERDKWIKKELKSLDQAINDKKRQIAAIHKDLEDTEANKEKNLEQYNKLDQDLNEVKARVEELDRKYYEVKNKKDELQSERNYLWREENAEQQALAAKREDLEKKQQLLRAATGKAILNGIDSINKVLDHFRRKGINQHVQNGYHGIVMNNFECEPAFYTCVEVTAGNRLFYHIVDSDEVSTKILMEFNKMNLPGEVTFLPLNKLDVRDTAYPETNDAIPMISKLRYNPRFDKAFKHVFGKTLICRSMEVSTQLARAFTMDCITLEGDQVSHRGALTGGYYDTRKSRLELQKDVRKAEEELGELEAKLNENLRRNIERINNEIDQLMNQMQQIETQQRKFKASRDSILSEMKMLKEKRQQSEKTFMPKQRSLQSLEASLHAMESTRESLKAELGTDLLSQLSLEDQKRVDALNDEIRQLQQENRQLLNERIKLEGIITRVETYLNENLRKRLDQVEQELNELRETEGGTVLTATTSELEAINKRVKDTMARSEDLDNSIDKTEAGIKELQKSMERWKNMEKEHMDAINHDTKELEKMTNRQGMLLKKKEECMKKIRELGSLPQEAFEKYQTLSLKQLFRKLEQCNTELKKYSHVNKKALDQFVNFSEQKEKLIKRQEELDRGYKSIMELMNVLELRKYEAIQLTFKQVSKNFSEVFQKLVPGGKATLVMKKGDVEGSQSQDEGEGSGESERGSGSQSSVPSVDQFTGVGIRVSFTGKQGEMREMQQLSGGQKSLVALALIFAIQKCDPAPFYLFDEIDQALDAQHRKAVSDMIMELAVHAQFITTTFRPELLESADKFYGVKFRNKVSHIDVITAEMAKDFVEDDTTHG

SEQ ID NO: 160 - protein, 737 aa, Homo sapiens
MSDQDHSMDEMTAVVKIEKGVGGNNGGNGNGGGAFSQARSSSTGSSSSTGGGGQGANGWQIISSSSGATPTSKEQSGSSTNGSNGSESSKNRTVSGGQYVVAAAPNLQNQQVLTGLPGVMPNIQYQVIPQFQTVDGQQLQFAATGAQVQQDGSGQIQIIPGANQQIITNRGSGGNIIAAMPNLLQQAVPLQGLANNVLSGQTQYVTNVPVALNGNITLLPVNSVSAATLTPSSQAVTISSSGSQESGSQPVTSGTTISSASLVSSQASSSSFFTNANSYSTTTTTSNMGIMNFTTSGSSGTNSQGQTPQRVSGLQGSDALNIQQNQTSGGSLQAGQQKEGEQNQQTQQQQILIQPQLVQGGQALQALQAAPLSGQTFTTQAISQETLQNLQLQAVPNSGPIIIRTPTVGPNGQVSWQTLQLQNLQVQNPQAQTITLAPMQGVSLGQTSSSNTTLTPIASAASIPAGTVTVNAAQLSSMPGLQTINLSALGTSGIQVHPIQGLPLAIANAPGDHGAQLGLHGAGGDGIHDDTAGGEEGENSPDAQPQAGRRTRREACTCPYCKDSEGRGSGDPGKKKQHICHIQGCGKVYGKTSHLRAHLRWHTGERPFMCTWSYCGKRFTRSDELQRHKRTHTGEKKFACPECPKRFMRSDHLSKHIKTHQNKKGGPGVALSVGTLPLDSGAGSEGSGTATPSALITTNMVAMEAICPEGIARLANSGINVMQVADLQSINISGNGF

SEQ ID NO: 161 - protein, 396 aa, Homo sapiens
MAFAPMGPEASFFDVLDRHRESLLAALRRGGREPPTGGSRLASSSEVLASIENIIQDIITSLARNEAPAFTIDNRSSWENIKFEDSVGLQMVSHCTTRKIKSDSPKSAQKFSLILKILSMIYKLVQSNTYATKRDIYYTDSQLFGNQTVVDNIINDISCMLKVSRRSLHILSTSKGLIAGNLRYIEEDGTKVNCTCGATAVAVPSNIQGIRNLVTDAKFVLIVEKDATFQRLLDDNFCNKLSPCIMITGKGVPDLNTRLLVKKLWDTFHVPVFTLVDADPHGIEIMCIYKYGSMSMSFEAHHLTVPAIRWLGLLPSDLKRLNVPKDSLIPLTKRDQMKLDSILRRPYVTCQPFWRKEMEIMADSKMKAEIQALTFLSSDYLSRVYLPNKLKFGGWI

SEQ ID NO: 162 - protein, 794 aa, Homo sapiens
MAGWIQAQQLQGDALRQMQVLYGQHFPIEVRHYLAQWIESQPWDAIDLDNPQDRAQATQLLEGLVQELQKKAEHQVGEDGFLLKIKLGHYATQLQKTYDRCPLELVRCIRHILYNEQRLVREANNCSSPAGILVDAMSQKHLQINQTFEELRLVTQDTENELKKLQQTQEYFIIQYQESLRIQAQFAQLAQLSPQERLSRETALQQKQVSLEAWLQREAQTLQQYRVELAEKHQKTLQLLRKQQTIILDDELIQWKRRQQLAGNGGPPEGSLDVLQSWCEKLAEIIWQNRQQIRRAEHLCQQLPIPGPVEEMLAEVNATITDIISALVTSTFIIEKQPPQVLKTQTKFAATVRLLVGGKLNVHMNPPQVKATIISEQQAKSLLKNENTRNECSGEILNNCCVMEYHQATGTLSAHFRNMSLKRIKRADRRGAESVTEEKFTVLFESQFSVGSNELVFQVKTLSLPVVVIVHGSQDHNATATVLWDNAFAEPGRVPFAVPDKVLWPQLCEALNMKFKAEVQSNRGLTKENLVFLAQKLFNNSSSHLEDYSGLSVSWSQFNRENLPGWNYTFWQWFDGVMEVLKKHHKPHWNDGAILGFVNKQQAHDLLINKPDGTFLLRFSDSEIGGITIAWKFDSPERNLWNLKPFTTRDFSIRSLADRLGDLSYLIYVFPDRPKDEVFSKYYTPVLAKAVDGYVKPQIKQVVPEFVNASADAGGSSATYMDQAPSPAVCPQAPYNMYPQNPDHVLDQDGEFDLDETMDVARHVEELLRRPMDSLDSRLSPPAGLFTSARGSLS

SEQ ID NO: 163 - protein, 236 aa, Homo sapiens
MVSSGKKYSRKSGKPSVEDQFTRAYDFETEDKKDLSGSEEDVIEGKTAVIEKRRKKRSSAGVVEDMGGEVQNMLEGVGVDINKALLAKRKRLEMYTKASLKTSNQKIEHVWKTQQDQRQKLNQEYSQQFLTLFQQWDLDMQKAEEQEEKILNMFRQQQKILQQSRIVQSQRLKTIKQLYEQFIKSMEELEKNHDNLLTGAQNEFKKEMAMLQKKIMMETQQQEIASVRKSLQSMLF

SEQ ID NO: 164 - protein, 2789 aa, Homo sapiens
MPSDAKDSVNGDLLLNWTSLKNILSGLNASFPLHNNTGSSTVTTSKSIKDPRLMRREESMGEQSSTAGLNEVLQFEKSSDNVNSEIKSTPSNSASSSEVVPGDCAVLTNGLDTPCFKTSVNDSQSWAHNMGSEDYDCIPPNKVTMAGQCKDQGNFSFPISVSNVVSEVENQNHSEEKAQRAQQESGNAYTKEYSSHIFQDSQSSDLKTIYQTGCQTSTVFPLKKKVSIDEYLQNTGKMKNFADLEDSSKHEEKQTSWKEIDNDFTNETKISPIDNYIVLHQEYKESESHNSFGKSCDKILITQELEITKSSTSTIKDKDELDHLALEWQITPSFESLSQKHPQHSVEYEGNIHTSLAIAQKLMELKLGKINQNYASIITEAFPKPKDIPQAKEMFIDTVISSYNIETAHDSSNCSITREHICVHRKNENEPVSLENIQRDYKETAYVEDRGQDHNLFCNSQLSNDIWLNVNFKKQTDRENQNEAKENSASCVENNIENIYGDKKQDSHTNENFSNIDEKEDKNYHNIEILSSEEFSTKFNLICREDNAVSAATALLESEEDTISAVKQKDTENTGRSVEHLASTTFPKTASSSVCVASNAAIQIASATMPALSLNNDDHQIYQFKETCSSESPDFGLLVKHRVSDCEIDTDKNKSQESFHQSINENLVLQSIELESEIEIELEDCDDAFIFQQDTHSHENMLCEEFVTSYKALKSRISWEGLLALDNGEMEVLESTTGRENSDQHYSKESNYFYSSTQNNETELTSPILLPDLQIKITNIFRPGFSPTADSLALKDSFCTHVTEATKPEINKEDGEILGFDIYSQPFGENADYPCEDKVDNIRQESGPVSNSEISLSFDLSRNTDVNHTSENQNSESLFTEPSNVTTIDDGSRCFFTKSKTDYNDTKNKKEVESRISKRKLHISSRDQNIPHKDLRRHKIYGRKRRLTSQDSSECFSSLSQGRIKTFSQSEKHIKSVLNILSDEASLCKSKCLSRKLDKAVVHLKKAHRRVHTSLQLITKVGEERKGPLPKSYAIICNNFWESCDLQGYSSVSQRKYYSTKHFSSKRKYDKRRKKRAPKADISKSLTHVSKHKSYKTSGEKKCLSRKSMASSVSKSHPTTSHMGEFCNQEHPESQLPVSSTSQSTSQSVYYNSSVSNPSLSEEHQPFSGKTAYLFSPDHSDEKLIEKENQIDTAFLSSTSKYEKLEKHSANHNVKDATKENSCDANEVINESNSVSLSCIKENINSSTGNDCDATCIGHTKAKTDVLISVLDSNVKHFLNDLYQQGNLILSDCKRNLEVKWTDPIERPKQNIITGNFLMGPLNLTLIASKKYSIPQLSAAAVTDSEGESSKSYLDKQRILTVDSFAASSTVPHCEQSCREKELLKTEQCSSGNCLHTDGNETNVTENYELDVASGTEEDKSYGENIVELSSSDSSLLLKDNVKGSSSETCIVKKDTEDRITWKVKQAEKAKDSVYKRSMTEGSTVNTEYKNQKNQISEESCLNEKIITTNLIDSHLSTKNTTTESVPLKNTVSNPLNKREKKGEIKVSKDSQSDLTLHSEIAYISKPGILGVNHTPILPAHSETCKVPTLLKKPASYVSDFKEKHCSANHTALIANLSQILQRADEASSLQILQEETKVCLNILPLFVEAFERKQECSVEQILISRELLVDQNLWNNCKHTLKPCAVDTLVELQMMMETIQFIENKKRHLEGEPTLRSLLWYDETLYAELLGKPRGFQQQSNFYPGFQGRLKYNAFCELQTYHDQLVELLEETKREKNSYYVFLKYKRQVNECEAIMEHCSDCFDFSLSVPFTCGVNFGDSLEDLEILRKSTLKLINVCGDSPKVHSYPGKQDHLWIIIEMISSKVNFIKNNEAVRVKISLYGLEHIFFDAAKNLVWKERTQSFSKKYSQKKDEERLLRVNKCAFSKLQKIYDTLSKDLNNEPISPIGLEEDTIIASRKSDHPINEATISIENSKFNSNLLAHPDICCISEILDQAEFADLKKLQDLTLRCTDHLEILKKYFQMLQDNNMDNIFITEENVLDVVINHSHEAIILKPEAIEMYIEIVMVSETIHFLKNSIAKKLDKQRFRGMLWFDLSLLPELVQCQEKMASFSFLKDNSTDVCLWKVIETAVSELKKDLDIICKYNEAVNCSYAIHLLSRELQELSEIKKLLKKSKYFISTYIDFVPYIASINYGSTVTELEYNYNQFSTLLKNVMSAPRKDLGKMAHIRKVMKTIEHMKMICTKNAELTISFFLCQMLYNRRKILQLKRKEKMNIHIVKPGENNNKFSISTMLPPVSECINKNISNSSKKRPSTVDKCEDSQEQQQDTTVSSCKKLKVDMKDVTKINREKATFKHPRTTGSHPKSENKIVPSSCDSLKRNHLTPKKVEMQRSLPGSLLPLENPKDTCASKSESKIDLTVSSDHFSGQQENLNSMKKRNVNFSAAETKSDKKDCAAFAICDQKSVHGTFSPDHGTLLQKFLKNSPDPTQKSCLSDINPETDVSLVPDASVLSKPIFCFVKDVHPDLEMNDTVFELQDNDIVNSSIKNSSCMTSPEPICIQNKIPTLQINKLQPTETESEDKYMKDTLNPNTVHTFGASGHITLNVNQGAEYSLSEQQNDKNSKVLMQNAATYWNELPQSACNPTYNSSEHLFGTSYPYSAWCVYQYSNSNGNAITQTYQGITSYEVQPSPSGLLTTVASTAQGTHSNLLYSQYFTYFAGEPQANGFVPVNGYFQSQIPASNFRQPIFSQYASHQPLPQATYPYLPNRFVPPEVPWVYAPWHQESFHPGH

SEQ ID NO: 165 - protein, 1001 aa, Homo sapiens
MIFPVARYALRWLRRPEDRAFSRAAMEMALRGVRKVLCVAEKNDAAKGIADLLSNGRMRRREGLSKFNKIYEFDYHLYGQNVTMVMTSVSGHLLAHDFQMQFRKWQSCNPLVLFEAEIEKYCPENFVDIKKTLERETRQCQALVIWTDCDREGENIGFEIIHVCKAVKPNLQVLRARFSEITPHAVRTACENLTEPDQRVSDAVDVRQELDLRIGAAFTRFQTLRLQRIFPEVLAEQLISYGSCQFPTLGFVVERFKAIQAFVPEIFHRIKVTHDHKDGIVEFNWKRHRLFNHTACLVLYQLCVEDPMATVVEVRSKPKSKWRPQALDTVELEKLASRKLRINAKETMRIAEKLYTQGYISYPRTETNIFPRDLNLTVLVEQQTPDPRWGAFAQSILERGGPTPRNGNKSDQAHPPIHPTKYTNNLQGDEQRLYEFIVRHFLACCSQDAQGQETTVEIDIAQERFVAHGLMILARNYLDVYPYDHWSDKILPVYEQGSHFQPSTVEMVDGETSPPKLLTEADLIALMEKHGIGTDATHAEHIETIKARMYVGLTPDKRFLPGHLGMGLVEGYDSMGYEMSKPDLRAELEADLKLICDGKKDKFVVLRQQVQKYKQVFIEAVAKAKKLDEALAQYFGNGTELAQQEDIYPAMPEPIRKCPQCNKDMVLKTKKNGGFYLSCMGFPECRSAVWLPDSVLEASRDSSVCPVCQPHPVYRLKLKFKRGSLPPTMPLEFVCCIGGCDDTLREILDLRFSGGPPRASQPSGRLQANQSLNRMDNSQHPQPADSRQTGSSKALAQTLPPPTAAGESNSVTCNCGQEAVLLTVRKEGPNRGRQFFKCNGGSCNFFLWADSPNPGAGGPPALAYRPLGASLGCPPGPGIHLGGFGNPGDGSGSGTSCLCSQPSVTRTVQKDGPNKGRQFHTCAKPREQQCGFFQWVDENTAPGTSGAPSWTGDRGRTLESEARSKRPRASSSDMGSTAKKPRKCSLCHQPGHTRPFCPQNR

SEQ ID NO: 166 - protein, 393 aa, Homo sapiens [sequence omitted]

SEQ ID NO: 167 - protein, 685 aa, Homo sapiens
MQIFVKTLTGKTITLEVEPSDTIENVKAKIQDKEGIPPDQQRLIFAGKQLEDGRTLSDYNIQKESTLHLVLRLRGGMQIFVKTLTGKTITLEVEPSDTIENVKAKIQDKEGIPPDQQRLIFAGKQLEDGRTLSDYNIQKESTLHLVLRLRGGMQIFVKTLTGKTITLEVEPSDTIENVKAKIQDKEGIPPDQQRLIFAGKQLEDGRTLSDYNIQKESTLHLVLRLRGGMQIFVKTLTGKTITLEVEPSDTIENVKAKIQDKEGIPPDQQRLIFAGKQLEDGRTLSDYNIQKESTLHLVLRLRGGMQIFVKTLTGKTITLEVEPSDTIENVKAKIQDKEGIPPDQQRLIFAGKQLEDGRTLSDYNIQKESTLHLVLRLRGGMQIFVKTLTGKTITLEVEPSDTIENVKAKIQDKEGIPPDQQRLIFAGKQLEDGRTLSDYNIQKESTLHLVLRLRGGMQIFVKTLTGKTITLEVEPSDTIENVKAKIQDKEGIPPDQQRLIFAGKQLEDGRTLSDYNIQKESTLHLVLRLRGGMQIFVKTLTGKTITLEVEPSDTIENVKAKIQDKEGIPPDQQRLIFAGKQLEDGRTLSDYNIQKESTLHLVLRLRGGMQIFVKTLTGKTITLEVEPSDTIENVKAKIQDKEGIPPDQQRLIFAGKQLEDGRTLSDYNIQKESTLHLVLRLRGGV

SEQ ID NO: 168 - protein, 231 aa, Homo sapiens
MALLVRVLRNQTSISQWVPVCSRLIPVSPTQGQGDRALSRTSQKIKIAALRMYTSCVEKTDFEEFFLRCQMPDTFNSWFLITLLHVWMCLVRMKQEGRSGKYMCRIIVHFMWEDVQQRGRVMGVNPYILKKNMILMTNHFYAAILGYDEGILSDDHGLAAALWRTFFNRKCEDPRHLELLVEYVRKQIQYLDSMNGEDLLLTGEVSWRPLVEKNPQSILKPHSPTYNDEGL

SEQ ID NO: 169 - protein, 963 aa, Homo sapiens
MAVAPRLFGGLCFRFRDQNPEVAVEGRLPISHSCVGCRRERTAMATVAANPAAAAAAVAAAAAVTEDREPQHEELPGLDSQWRQIENGESGRERPLRAGESWFLVEKHWYKQWEAYVQGGDQDSSTFPGCINNATLFQDEINWRLKEGLVEGEDYVLLPAAAWHYLVSWYGLEHGQPPIERKVIELPNIQKVEVYPVELLLVRHNDLGKSHTVQFSHTDSIGLVLRTARERFLVEPQEDTRLWAKNSEGSLDRLYDTHITVLDAALETGQLIIMETRKKDGTWPSAQLHVMNNNMSEEDEDFKGQPGICGLTNLGNTCFMNSALQCLSNVPQLTEYFLNNCYLEELNFRNPLGMKGEIAEAYADLVKQAWSGHHRSIVPHVFKNKVGHFASQFLGYQQHDSQELLSFLLDGLHEDLNRVKKKEYVELCDAAGRPDQEVAQEAWQNHKRRNDSVIVDTFHGLFKSTLVCPDCGNVSVTFDPFCYLSVPLPISHKRVLEVFFIPMDPRRKPEQHRLVVPKKGKISDLCVALSKHTGISPERMMVADVFSHRFYKLYQLEEPLSSILDRDDIFVYEVSGRIEAIEGSREDIVVPVYLRERTPARDYNNSYYGLMLFGHPLLVSVPRDRFTWEGLYNVLMYRLSRYVTKPNSDDEDDGDEKEDDEEDKDDVPGPSTGGSLRDPEPEQAGPSSGVTNRCPFLLDNCLGTSQWPPRRRRKQLFTLQTVNSNGTSDRTTSPEEVHAQPYIAIDWEPEMKKRYYDEVEAEGYVKHDCVGYVMKKAPVRLQECIELFTTVETLEKENPWYCPSCKQHQLATKKLDLWMLPEILIIHLKRFSYTKFSREKLDTLVEFPIRDLDFSEFVIQPQNESNPELYKYDLIAVSNHYGGMRDGHYTTFACNKDSGQWHYFDDNSVSPVNENQIESKAAYVLFYQRQDVARRLLSPAGSSGAPASPACSSPPSSEFMDVN

SEQ ID NO: 170 - protein, 552 aa, Homo sapiens
MDNKISPEAQVAELELDAVIGFNDIILWDYKNRELLARLSLHKGKIEALAFSPNDLYLVSLGGPDDGSVVVWSIAKRDAICGSPAAGLNVGNATNVIFSRCRDEMFMTAGNGTIRVWELDLPNRKIWPTECQTGQLKRIVMSIGVDDDDSFFYLGTTTGDILKMNPRTKLLTDVGPAKDKFSLGVSAIRCLKMGGLLVGSGAGLLVFCKSPGYKPIKKIQLQGGITSITLRGEGHQFLVGTEESHIYRVSFTDFKETLIATCHFDAVEDIVFPFGTAELFATCAKKDIRVWHTSSNRELLRITVPNMTCHGIDFMRDGKSIISAWNDGKIRAFAPETGRLMYVINNAHRIGVTAIATTSDCKRVISGGGEGEVRVWQIGCQTQKLEEALKEHKSSVSCIRVKRNNEECVTASTDGTCIIWDLVRLRRNQMILANTLFQCVCYHPEEFQIITSGTDRKIAYWEVFDGTVIRELEGSLSGSINGMDITQEGVHFVTGGNDHLVKVWDYNEGEVTHVGVGHSGNITRIRISPGNQYIVSVSADGAILRWKYPYTS

SEQ ID NO: 171 - protein, 346 aa, Homo sapiens
MDLDLLDLNPRIIAAIKKAKLKSVKEVLHFSGPDLKRLTNLSSPEVWHLLRTASLHLRGSSILTALQLHQQKERFPTQHQRLSLGCPVLDALLRGGLPLDGITELAGRSSAGKTQLALQLCLAVQFPRQHGGLEAGAVYICTEDAFPHKRLQQLMAQQPRLRTDVPGELLQKLRFGSQIFIEHVADVDTLLECVNKKVPVLLSRGMARLVVIDSVAAPFRCEFDSQASAPRARHLQSLGATLRELSSAFQSPVLCINQVTEAMEEQGAAHGPLGFWDERVSPALGITWANQLLVRLLADRLREEEAALGCPARTLRVLSAPHLPPSSCSYTISAEGVRGTPGTQSH

SEQ ID NO: 172 - protein, 1863 aa, Homo sapiens
MDLSALRVEEVQNVINAMQKILECPICLELIKEPVSTKCDHIFCKFCMLKLLNQKKGPSQCPLCKNDITKRSLQESTRFSQLVEELLKIICAFQLDTGLEYANSYNFAKKENNSPEHLKDEVSIIQSMGYRNRAKRLLQSEPENPSLQETSLSVQLSNLGTVRTLRTKQRIQPQKTSVYIELGSDSSEDTVNKATYCSVGDQELLQITPQGTRDEISLDSAKKAACEFSETDVTNTEHHQPSNNDLNTTEKRAAERHPEKYQGSSVSNLHVEPCGTNTHASSLQHENSSLLLTKDRMNVEKAEFCNKSKQPGLARSQHNRWAGSKETCNDRRTPSTEKKVDLNADPLCERKEWNKQKLPCSENPRDTEDVPWITLNSSIQKVNEWFSRSDELLGSDDSHDGESESNAKVADVLDVLNEVDEYSGSSEKIDLLASDPHEALICKSERVHSKSVESNIEDKIFGKTYRKKASLPNLSHVTENLIIGAFVTEPQIIQERPLTNKLKRKRRPTSGLHPEDFIKKADLAVQKTPEMINQGTNQTEQNGQVMNITNSGHENKTKGDSIQNEKNPNPIESLEKESAFKTKAEPISSSISNMELELNIHNSKAPKKNRLRRKSSTRHIHALELVVSRNLSPPNCTELQIDSCSSSEEIKKKKYNQMPVRHSRNLQLMEGKEPATGAKKSNKPNEQTSKRHDSDTFPELKLTNAPGSFTKCSNTSELKEFVNPSLPREEKEEKLETVKVSNNAEDPKDLMLSGERVLQTERSVESSSISLVPGTDYGTQESISLLEVSTLGKAKTEPNKCVSQCAAFENPKGLIHGCSKDNRNDTEGFKYPLGHEVNHSRETSIEMEESELDAQYLQNTFKVSKRQSFAPFSNPGNAEEECATFSAHSGSLKKQSPKVTFECEQKEENQGKNESNIKPVQTVNITAGFPVVGQKDKPVDNAKCSIKGGSRFCLSSQFRGNETGLITPNKHGLLQNPYRIPPLFPIKSFVKTKCKKNLLEENFEEHSMSPEREMGNENIPSTVSTISRNNIRENVFKEASSSNINEVGSSTNEVGSSINEIGSSDENIQAELGRNRGPKLNAMLRLGVLQPEVYKQSLPGSNCKHPEIKKQEYEEVVQTVNTDFSPYLISDNLEQPMGSSHASQVCSETPDDLLDDGEIKEDTSFAENDIKESSAVFSKSVQKGELSRSPSPFTHTHLAQGYRRGAKKLESSEENLSSEDEELPCFQHLLFGKVNNIPSQSTRHSTVATECLSKNTEENLLSLKNSLNDCSNQVILAKASQEHHLSEETKCSASLFSSQCSELEDLTANTNTQDPFLIGSSKQMRHQSESQGVGLSDKELVSDDEERGTGLEENNQEEQSMDSNLGEAASGCESETSVSEDCSGLSSQSDILTTQQRDTMQHNLIKLQQEMAELEAVLEQHGSQPSNSYPSIISDSSALEDLRNPEQSTSEKAVLTSQKSSEYPISQNPEGLSADKFEVSADSSTSKNKEPGVERSSPSKCPSLDDRWYMHSCSGSLQNRNYPSQEELIKVVDVEEQQLEESGPHDLTETSYLPRQDLEGTPYLESGISLFSDDPESDPSEDRAPESARVGNIPSSTSALKVPQLKVAESAQSPAAAHTTDTAGYNAMEESVSREKPELTASTERVNKRMSMVVSGLTPEEFMLVYKFARKHHITLTNLITEETTHVVMKTDAEFVCERTLKYFLGIAGGKWVVSYFWVTQSIKERKMLNEHDFEVRGDVVNGRNHQGPKRARESQDRKIFRGLEICCYGPFTNMPTDQLEWMVQLCGASVVKELSSFTLGTGVHPIVVVQPDAWTEDNGFHAIGQMCEAPVVTREWVLDSVALYQCQELDTYLIPQIPHSHY

SEQ ID NO: 173 - DNA, 7224 bp, Homo sapiens
gtaccttgatttcgtattctgagaggctgctgcttagcggtagccccttggtttccgtggcaacggaaaagcgcgggaattacagataaattaaaactgcgactgcgcggcgtgagctcgctgagacttcctggacgggggacaggctgtggggtttctcagataactgggcccctgcgctcaggaggccttcaccctctgctctgggtaaagttcattggaacagaaagaaatggatttatctgctcttcgcgttgaagaagtacaaaatgtcattaatgctatgcagaaaatcttagagtgtcccatctgtctggagttgatcaaggaacctgtctccacaaagtgtgaccacatattttgcaaattttgcatgctgaaacttctcaaccagaagaaagggccttcacagtgtcctttatgtaagaatgatataaccaaaaggagcctacaagaaagtacgagatttagtcaacttgttgaagagctattgaaaatcatttgtgcttttcagcttgacacaggtttggagtatgcaaacagctataattttgcaaaaaaggaaaataactctcctgaacatctaaaagatgaagtttctatcatccaaagtatgggctacagaaaccgtgccaaaagacttctacagagtgaacccgaaaatccttccttgcaggaaaccagtctcagtgtccaactctctaaccttggaactgtgagaactctgaggacaaagcagcggatacaacctcaaaagacgtctgtctacattgaattgggatctgattcttctgaagataccgttaataaggcaacttattgcagtgtgggagatcaagaattgttacaaatcacccctcaaggaaccagggatgaaatcagtttggattctgcaaaaaaggctgcttgtgaattttctgagacggatgtaacaaatactgaacatcatcaacccagtaataatgatttgaacaccactgagaagcgtgcagctgagaggcatccagaaaagtatcagggtagttctgtttcaaacttgcatgtggagccatgtggcacaaatactcatgccagctcattacagcatgagaacagcagtttattactcactaaagacagaatgaatgtagaaaaggctgaattctgtaataaaagcaaacagcctggcttagcaaggagccaacataacagatgggctggaagtaaggaaacatgtaatgataggcggactcccagcacagaaaaaaaggtagatctgaatgctgatcccctgtgtgagagaaaagaatggaataagcagaaactgccatgctcagagaatcctagagatactgaagatgttccttggataacactaaatagcagcattcagaaagttaatgagtggttttccagaagtgatgaactgttaggttctgatgactcacatgatggggagtctgaatcaaatgccaaagtagctgatgtattggacgttctaaatgaggtagatgaatattctggttcttcagagaaaatagacttactggccagtgatcctcatgaggctttaatatgtaaaagtgaaagagttcactccaaatcagtagagagtaatattgaagacaaaatatttgggaaaacctatcggaagaaggcaagcctccccaacttaagccatgtaactgaaaatctaattataggagcatttgttactgagccacagataatacaagagcgtcccctcacaaataaattaaagcgtaaaaggagacctacatcaggccttcatcctgaggattttatcaagaaagcagatttggcagttcaaaagactcctgaaatgataaatcagggaactaaccaaacggagcagaatggtcaagtgatgaatattactaatagtggtcatgagaataaaacaaaaggtgattctattcagaatgagaaaaatcctaacccaatagaatcactcgaaaaagaatctgctttcaaaacgaaagctgaacctataagcagcagtataagcaatatggaactcgaattaaatatccacaattcaaaagcacctaaaaagaataggctgaggaggaagtcttctaccaggcatattcatgcgcttgaactagtagtcagtagaaatctaagcccacctaattgtactgaattgcaaattgatagttgttctagcagtgaagagataaagaaaaaaaagtacaaccaaatgccagtcaggcacagcagaaacctacaactcatggaaggtaaagaacctgcaactggagccaagaagagtaacaagccaaatgaacagacaagtaaaagacatgacagcgatactttcccagagctgaagttaacaaatgcacctggttcttttactaagtgttcaaataccagtgaacttaaagaatttgtcaatcctagccttccaagagaagaaaaagaagagaaactagaaacagttaaagtgtctaataatgctgaagaccccaaagatctcatgttaagtggagaaagggttttgcaaactgaaagatctgtagagagtagcagtatttcattggtacctggtactgattatggcactcaggaaagtatctcgttactggaagttagcactctagggaaggcaaaaacagaaccaaataaatgtgtgagtcagtgtgcagcatttgaaaaccccaagggactaattcatggttgttccaaagataatagaaatgacacagaaggctttaagtatccattgggacatgaagttaaccacagtcgggaaacaagcatagaaatggaagaaagtgaacttgatgctcagtatttgcagaatacattcaaggtttcaaagcgccagtcatttgctccgttttcaaatccaggaaatgcagaagaggaatgtgcaacattctctgcccactctgggtccttaaagaaacaaagtccaaaagtcacttttgaatgtgaacaaaaggaagaaaatcaaggaaagaatgagtctaatatcaagcctgtacagacagttaatatcactgcaggctttcctgtggttggtcagaaagataagccagttgataatgccaaatgtagtatcaaaggaggctctaggttttgtctatcatctcagttcagaggcaacgaaactggactcattactccaaataaacatggacttttacaaaacccatatcgtataccaccactttttcccatcaagtcatttgttaaaactaaatgtaagaaaaatctgctagaggaaaactttgaggaacattcaatgtcacctgaaagagaaatgggaaatgagaacattccaagtacagtgagcacaattagccgtaataacattagagaaaatgtttttaaagaagccagctcaagcaatattaatgaagtaggttccagtactaatgaagtgggctccagtattaatgaaataggttccagtgatgaaaacattcaagcagaactaggtagaaacagagggccaaaattgaatgctatgcttagattaggggttttgcaacctgaggtctataaacaaagtcttcctggaagtaattgtaagcatcctgaaataaaaaagcaagaatatgaagaagtagttcagactgttaatacagatttctctccatatctgatttcagataacttagaacagcctatgggaagtagtcatgcatctcaggtttgttctgagacacctgatgacctgttagatgatggtgaaataaaggaagatactagttttgctgaaaatgacattaaggaaagttctgctgtttttagcaaaagcgtccagaaaggagagcttagcaggagtcctagccctttcacccatacacatttggctcagggttaccgaagaggggccaagaaattagagtcctcagaagagaacttatctagtgaggatgaagagcttccctgcttccaacacttgttatttggtaaagtaaacaatataccttctcagtctactaggcatagcaccgttgctaccgagtgtctgtctaagaacacagaggagaatttattatcattgaagaatagcttaaatgactgcagtaaccaggtaatattggcaaaggcatctcaggaacatcaccttagtgaggaaacaaaatgttctgctagcttgttttcttcacagtgcagtgaattggaagacttgactgcaaatacaaacacccaggatcctttcttgattggttcttccaaacaaatgaggcatcagtctgaaagccagggagttggtctgagtgacaaggaattggtttcagatgatgaagaaagaggaacgggcttggaagaaaataatcaagaagagcaaagcatggattcaaacttaggtgaagcagcatctgggtgtgagagtgaaacaagcgtctctgaagactgctcagggctatcctctcagagtgacattttaaccactcagcagagggataccatgcaacataacctgataaagctccagcaggaaatggctgaactagaagctgtgttagaacagcatgggagccagccttctaacagctacccttccatcataagtgactcttctgcccttgaggacctgcgaaatccagaacaaagcacatcagaaaaagcagtattaacttcacagaaaagtagtgaataccctataagccagaatccagaaggcctttctgctgacaagtttgaggtgtctgcagatagttctaccagtaaaaataaagaaccaggagtggaaaggtcatccccttctaaatgcccatcattagatgataggtggtacatgcacagttgctctgggagtcttcagaatagaaactacccatctcaagaggagctcattaaggttgttgatgtggaggagcaacagctggaagagtctgggccacacgatttgacggaaacatcttacttgccaaggcaagatctagagggaaccccttacctggaatctggaatcagcctcttctctgatgaccctgaatctgatccttctgaagacagagccccagagtcagctcgtgttggcaacataccatcttcaacctctgcattgaaagttccccaattgaaagttgcagaatctgcccagagtccagctgctgctcatactactgatactgctgggtataatgcaatggaagaaagtgtgagcagggagaagccagaattgacagcttcaacagaaagggtcaacaaaagaatgtccatggtggtgtctggcctgaccccagaagaatttatgctcgtgtacaagtttgccagaaaacaccacatcactttaactaatctaattactgaagagactactcatgttgttatgaaaacagatgctgagtttgtgtgtgaacggacactgaaatattttctaggaattgcgggaggaaaatgggtagttagctatttctgggtgacccagtctattaaagaaagaaaaatgctgaatgagcatgattttgaagtcagaggagatgtggtcaatggaagaaaccaccaaggtccaaagcgagcaagagaatcccaggacagaaagatcttcagggggctagaaatctgttgctatgggcccttcaccaacatgcccacagatcaactggaatggatggtacagctgtgtggtgcttctgtggtgaaggagctttcatcattcacccttggcacaggtgtccacccaattgtggttgtgcagccagatgcctggacagaggacaatggcttccatgcaattgggcagatgtgtgaggcacctgtggtgacccgagagtgggtgttggacagtgtagcactctaccagtgccaggagctggacacctacctgataccccagatcccccacagccactactgactgcagccagccacaggtacagagccacaggaccccaagaatgagcttacaaagtggcctttccaggccctgggagctcctctcactcttcagtccttctactgtcctggctactaaatattttatgtacatcagcctgaaaaggacttctggctatgcaagggtcccttaaagattttctgcttgaagtctcccttggaaatctgccatgagcacaaaattatggtaatttttcacctgagaagattttaaaaccatttaaacgccaccaattgagcaagatgctgattcattatttatcagccctattctttctattcaggctgttgttggcttagggctggaagcacagagtggcttggcctcaagagaatagctggtttccctaagtttacttctctaaaaccctgtgttcacaaaggcagagagtcagacccttcaatggaaggagagtgcttgggatcgattatgtgacttaaagtcagaatagtccttgggcagttctcaaatgttggagtggaacattggggaggaaattctgaggcaggtattagaaatgaaaaggaaacttgaaacctgggcatggtggctcacgcctgtaatcccagcactttgggaggccaaggtgggcagatcactggaggtcaggagttcgaaaccagcctggccaacatggtgaaaccccatctctactaaaaatacagaaattagccggtcatggtggtggacacctgtaatcccagctactcaggtggctaaggcaggagaatcacttcagcccgggaggtggaggttgcagtgagccaagatcataccacggcactccagcctgggtgacagtgagactgtggctcaaaaaaaaaaaaaaaaaaaggaaaatgaaactagaagagatttctaaaagtctgagatatatttgctagatttctaaagaatgtgttctaaaacagcagaagattttcaagaaccggtttccaaagacagtcttctaattcctcattagtaataagtaaaatgtttattgttgtagctctggtatataatccattcctcttaaaatataagacctctggcatgaatatttcatatctataaaatgacagatcccaccaggaaggaagctgttgctttctttgaggtgatttttttcctttgctccctgttgctgaaaccatacagcttcataaataattttgcttgctgaaggaagaaaaagtgtttttcataaacccattatccaggactgtttatagctgttggaaggactaggtcttccctagcccccccagtgtgcaagggcagtgaagacttgattgtacaaaatacgttttgtaaatgttgtgctgttaacactgcaaataaacttggtagcaaacacttccaaaaaaaaaaaaaaaaaa

SEQ ID NO: 174 - DNA, 99 bp, Artificial Sequence
  Description of Artificial Sequence: Synthetic oligonucleotide
tggacggcgacgtaaacggccacaagttcagcgtgtccggcgagggcgagggcgatgccacctacggcaagctgaccctgaagttcatctgcaccaccg

SEQ ID NO: 175 - DNA, 99 bp, Artificial Sequence
  Description of Artificial Sequence: Synthetic oligonucleotide
cggtggtgcagatgaacttcagggtcagcttgccgtaggtggcatcgccctcaccctcgccggacacgctgaacttgtggccgtttacgtcgccgtcca

SEQ ID NO: 176 - DNA, 75 bp, Artificial Sequence
  Description of Artificial Sequence: Synthetic oligonucleotide
taaacggccacaagttcagcgtgtccggcgagggtgagggcgatgccacctacggcaagctgaccctgaagttca

SEQ ID NO: 177 - DNA, 75 bp, Artificial Sequence
  Description of Artificial Sequence: Synthetic oligonucleotide
tgaacttcagggtcagcttgccgtaggtggcatcgccctcaccctcgccggacacgctgaacttgtggccgttta

SEQ ID NO: 178 - DNA, 75 bp, Artificial Sequence
  Description of Artificial Sequence: Synthetic oligonucleotide
tggacggcgacgtaaacggccacaagttcagcgtgtccggcgagggtgagggcgatgccacctacggcaagctga

SEQ ID NO: 179 - DNA, 75 bp, Artificial Sequence
  Description of Artificial Sequence: Synthetic oligonucleotide
tcagcttgccgtaggtggcatcgccctcaccctcgccggacacgctgaacttgtggccgtttacgtcgccgtcca

SEQ ID NO: 180 - DNA, 75 bp, Artificial Sequence
  Description of Artificial Sequence: Synthetic oligonucleotide
agttcagcgtgtccggcgagggtgagggcgatgccacctacggcaagctgaccctgaagttcatctgcaccaccg

SEQ ID NO: 181 - DNA, 75 bp, Artificial Sequence
  Description of Artificial Sequence: Synthetic oligonucleotide
cggtggtgcagatgaacttcagggtcagcttgccgtaggtggcatcgccctcaccctcgccggacacgctgaact

SEQ ID NO: 182 - DNA, 20 bp, Artificial Sequence
  Description of Artificial Sequence: Synthetic oligonucleotide
gagctcgctgagacttcctg

SEQ ID NO: 183 - DNA, 21 bp, Artificial Sequence
  Description of Artificial Sequence: Synthetic oligonucleotide
actccagacagatgggacact

SEQ ID NO: 184 - DNA, 20 bp, Artificial Sequence
  Description of Artificial Sequence: Synthetic oligonucleotide
gttccctctgcgtgttctca

SEQ ID NO: 185 - DNA, 20 bp, Artificial Sequence
  Description of Artificial Sequence: Synthetic oligonucleotide
ccatccaccatcagccaact

SEQ ID NO: 186 - DNA, 20 bp, Artificial Sequence
  Description of Artificial Sequence: Synthetic oligonucleotide
gcgagtagagaagtggagcg

SEQ ID NO: 187 - DNA, 20 bp, Artificial Sequence
  Description of Artificial Sequence: Synthetic oligonucleotide
ttagctccttctttggcgca

SEQ ID NO: 188 - DNA, 20 bp, Artificial Sequence
  Description of Artificial Sequence: Synthetic oligonucleotide
tcttgacctacgtggcttgg

SEQ ID NO: 189 - DNA, 20 bp, Artificial Sequence
  Description of Artificial Sequence: Synthetic oligonucleotide
aagcactctcaaccacctgc

SEQ ID NO: 190 - DNA, 41 bp, Artificial Sequence
  Description of Artificial Sequence: Synthetic oligonucleotide
gtttacagagaaacctcctcagctaatagctcacctacggc

SEQ ID NO: 191 - DNA, 36 bp, Artificial Sequence
  Description of Artificial Sequence: Synthetic oligonucleotide
ctgaggaggtttctctgtaaacggtcgaggccggac

SEQ ID NO: 192 - DNA, 24 bp, Artificial Sequence
  Description of Artificial Sequence: Synthetic oligonucleotide
gtagtcgacgccaccatggtgagc

SEQ ID NO: 193 - DNA, 30 bp, Artificial Sequence
  Description of Artificial Sequence: Synthetic oligonucleotide
gcattaattaagagcctctgcattcacttg

SEQ ID NO: 194 - DNA, 18 bp, Artificial Sequence
  Description of Artificial Sequence: Synthetic oligonucleotide
tgagcacctagtaagccc

SEQ ID NO: 195 - DNA, 18 bp, Artificial Sequence
  Description of Artificial Sequence: Synthetic oligonucleotide
tcagggcttactaggtgc

SEQ ID NO: 196 - DNA, 20 bp, Artificial Sequence
  Description of Artificial Sequence: Synthetic oligonucleotide
tgaggaggtttctctgtaaa

SEQ ID NO: 197 - DNA, 20 bp, Artificial Sequence
  Description of Artificial Sequence: Synthetic oligonucleotide
tcatttacagagaaacctcc

SEQ ID NO: 198 - DNA, 23 bp, Artificial Sequence
  Description of Artificial Sequence: Synthetic oligonucleotide
tgatttacagagaaacctcctca

SEQ ID NO: 199 - DNA, 23 bp, Artificial Sequence
  Description of Artificial Sequence: Synthetic oligonucleotide
tcatgaggaggtttctctgtaaa

SEQ ID NO: 200 - DNA, 18 bp, Artificial Sequence
  Description of Artificial Sequence: Synthetic oligonucleotide
atggcaatgcagatgcag

SEQ ID NO: 201 - DNA, 19 bp, Artificial Sequence
  Description of Artificial Sequence: Synthetic oligonucleotide
tcagtctttggcatctccc

SEQ ID NO: 202 - DNA, 39 bp, Artificial Sequence
  Description of Artificial Sequence: Synthetic oligonucleotide
ggagaattccgaactgggaggacccagatctgtcatacg

SEQ ID NO: 203 - DNA, 35 bp, Artificial Sequence
  Description of Artificial Sequence: Synthetic oligonucleotide
gcttaaggcgatcgccatggcaatgcagatgcagc

SEQ ID NO: 204 - DNA, 30 bp, Artificial Sequence
  Description of Artificial Sequence: Synthetic oligonucleotide
gtaacgcgtgtctttggcatctcccactcc

SEQ ID NO: 205 - DNA, 60 bp, Artificial Sequence
  Description of Artificial Sequence: Synthetic oligonucleotide
tttcttggctttatatatcttgtggaaaggacgaaacaccggtgtccggcctcgaccgtg

SEQ ID NO: 206 - DNA, 60 bp, Artificial Sequence
  Description of Artificial Sequence: Synthetic oligonucleotide
gactagccttattttaacttgctatttctagctctaaaaccacggtcgaggccggacacc

SEQ ID NO: 207 - DNA, 40 bp, Artificial Sequence
  Description of Artificial Sequence: Synthetic oligonucleotide
gaagtactccattgggctcgctatcggcacaaacagcgtc

SEQ ID NO: 208 - DNA, 45 bp, Artificial Sequence
  Description of Artificial Sequence: Synthetic oligonucleotide
ggcctcgaccgtgaggaggtttctctgtaaagctaagagctcacc

SEQ ID NO: 209 - DNA, 45 bp, Artificial Sequence
  Description of Artificial Sequence: Synthetic oligonucleotide
ggcctcgaccgtttacagagaaacctcctcagctaatagctcacc

SEQ ID NO: 210 - DNA, 39 bp, Artificial Sequence
  Description of Artificial Sequence: Synthetic oligonucleotide
cccgacaaccactacctgagcacctagtaagccctgagc

SEQ ID NO: 211 - DNA, 42 bp, Artificial Sequence
  Description of Artificial Sequence: Synthetic oligonucleotide
cccgacaaccactacctgaggaggtttctctgtaaatgagca

SEQ ID NO: 212 - DNA, 45 bp, Artificial Sequence
  Description of Artificial Sequence: Synthetic oligonucleotide
cccgacaaccactacctgatttacagagaaacctcctcatgagca

SEQ ID NO: 213 - DNA, 54 bp, Artificial Sequence
  Description of Artificial Sequence: Synthetic oligonucleotide
agcgtgtccggcctcgaccgtgaggaggtttctctgtaaagctaagagctcacc

SEQ ID NO: 214 - DNA, 39 bp, Artificial Sequence
  Description of Artificial Sequence: Synthetic oligonucleotide
gacaaccactacctgagcacccagtccgccctgagcaaa

SEQ ID NO: 215 - DNA, 39 bp, Artificial Sequence
  Description of Artificial Sequence: Synthetic oligonucleotide
gacaaccactacctgagcacctagtaagccctgagcaaa

SEQ ID NO: 216 - DNA, 41 bp, Artificial Sequence
  Description of Artificial Sequence: Synthetic oligonucleotide
gacaaccactacctgaggaggtttctctgtaaatgagcaaa

SEQ ID NO: 217 - DNA, 44 bp, Artificial Sequence
  Description of Artificial Sequence: Synthetic oligonucleotide
gacaaccactacctgatttacagagaaacctcctcatgagcaaa

SEQ ID NO: 218 - protein, 9 aa, Unknown
  Description of Unknown: "LAGLIDADG" family peptide motif
LAGLIDADG
